(19) United States
(12) Patent Application Publication
(10) Pub. No.: US 2013/0157934 A1
(43) Pub. Date: Jun. 20, 2013

(54) Glucagon Superfamily Peptides Exhibiting Glucocorticoid Receptor Activity

(71) Applicant: Indiana University Research and Technology Corp, Indianapolis, IN (US)

(72) Inventors: Richard D. DiMARCHI, Carmel, IN (US); Bin YANG, Bloomington, IN (US)

(73) Assignee: Indiana University Research and Technology Corporation, Indianapolis, IN (US)

(21) Appl. No.: 13/679,121

(22) Filed: Nov. 16, 2012

Related U.S. Application Data
(60) Provisional application No. 61/561,094, filed on Nov. 17, 2011.

(51) Int. Cl. C07K 14/605

(52) U.S. Cl. CPC C07K 14/605
USPC 514/5.3; 530/308; 514/11.7; 514/7.2

(57) ABSTRACT

Provided herein are glucagon superfamily peptides conjugated with GR ligands that are capable of acting at a glucocorticoid receptor. Also provided herein are pharmaceutical compositions and kits of the conjugates of the invention. Further provided herein are methods of treating a disease, e.g., a metabolic disorder, such as diabetes and obesity, comprising administering the conjugates of the invention.

### CROSS REFERENCE TO RELATED APPLICATIONS

[0001] This application claims priority to U.S. Provisional Patent Application No. 61/561,094, filed on Nov. 17, 2011, which is incorporated by reference in its entirety.

### INCORPORATION BY REFERENCE OF MATERIAL SUBMITTED ELECTRONICALLY

[0002] Incorporated by reference in its entirety is a computer-readable amino acid sequence listing submitted concurrently herewith and identified as follows: One 894,620 byte ASCII (Text) file named “223356_SeqListing.txt,” created on Nov. 14, 2012.

### BACKGROUND OF THE INVENTION

[0003] 1. Field of the Disclosure

[0004] This invention provides glucagon superfamily peptides conjugated to glucocorticoid receptor ligands that are capable of acting at glucocorticoid receptors.

[0005] 2. Brief Description of Related Technology

[0006] Nuclear hormone receptor proteins form a class of ligand activated proteins that, when bound to specific sequences of DNA, serve as on-off switches for transcription within the cell nucleus. These switches control the development and differentiation of skin, bone and behavioral centers in the brain, as well as the continual regulation of reproductive tissues.

[0007] Nuclear hormone receptor ligands such as steroids, sterols, retinoids, thyroid hormones, and vitamin D function to activate nuclear hormone receptors. The interaction of the hormone and receptor triggers a conformational change in the receptor, which results in the up-regulation of gene expression. The level of cellular signal transduction activated by the interaction of a ligand and a nuclear hormone receptor is determined by the number of ligands and receptors available for binding, and by the binding affinity between the ligand and the receptor. Many ligands and corresponding analogs that bind to nuclear hormone receptors are used as medication to treat, for example, Parkinson's disease (NURR1), sleep disorders (RZRβ), arthritis and cerebellar ataxia (RORα), central nervous system disorders (NOR-1, Rev-ErbAβ, T1x, NGFI-Bβ, HZF-2α, COUP-TFα, COUP-TFβ, COUR-TFγ, NUR77), hypercholesterolemia (LXRα, COR), obesity (Rev-ErbAα), diabetes (HNF4α), immune disorders (TOR), metabolic disorders (MB67α, SHP, FXR, SF-1, LXRβ), and infertility and contraception (GCNF, TR2-11α,β, TR4, ERα,β ERRα,β).

[0008] Pre-proglucagon is a 158 amino acid precursor polypeptide that is processed in different tissues to form a number of different proglucagon-derived peptides, including glucagon, glucagon-like peptide-1 (GLP-1), glucagon-like peptide-2 (GLP-2) and oxyntomodulin (OXM), that are involved in a wide variety of physiological functions, including glucose homeostasis, insulin secretion, gastric emptying, and intestinal growth, as well as the regulation of food intake. Glucagon is a 29-amino acid peptide that corresponds to amino acids 33 through 61 of pre-proglucagon, while GLP-1 is produced as a 37-amino acid peptide that corresponds to amino acids 72 through 108 of pre-proglucagon. GLP-1(7-36) amide or GLP-1(7-37) acid are biologically potent forms of GLP-1, that demonstrate essentially equivalent activity at the GLP-1 receptor.

[0009] Glucagon is used in the acute treatment of severe hypoglycemia. Oxyntomodulin has been reported to have pharmacological ability to suppress appetite and lower body weight. GLP-1 and GLP-1 receptor agonists are used as treatment for Type II diabetes. Exendin-4 is a peptide present in the saliva of the Gila monster that resembles GLP-1 in structure, and like glucagon and GLP-1, increases insulin release.

[0010] Gastric inhibitory polypeptide (GIP) is also known as a glucose-dependent insulinotropic peptide, and is a member of the secretin family of hormones. GIP is derived from a 153-amino acid proprotein encoded by the GIP gene and circulates as a biologically active 42-amino acid peptide. The GIP gene is expressed in the small intestine as well as the salivary glands and is a weak inhibitor of gastric acid secretion. In addition to its inhibitory effects in the stomach, in the presence of glucose, GIP enhances insulin release by pancreatic beta islet cells when administered in physiological doses. GIP is believed to function as an enteric factor that stimulates the release of pancreatic insulin and that may play a physiological role in maintaining glucose homeostasis.

[0011] Osteocalcin is a noncollagenous protein found in bone and dentin. It is secreted by osteoblasts and thought to play a role in mineralization and calcium ion homeostasis. Osteocalcin has also been reported to function as a hormone in the body, causing beta cells in the pancreas to release more insulin, and at the same time directing fat cells to release the hormone adiponectin, which increases sensitivity to insulin.

### SUMMARY OF THE INVENTION

[0012] Provided herein are glucagon superfamily peptides conjugated to ligands that activate nuclear glucocorticoid receptors (“GR ligands”). These conjugates with plural activities are useful for the treatment of a variety of diseases.

[0013] The glucagon superfamily peptide conjugates of the invention can be represented by the following formula:

Q-L-Y

wherein Q is a glucagon superfamily peptide, Y is a GR ligand, and L is a linking group or a bond. For example, the GR ligand is conjugated to Q or L at position 3 or 17 of the GR ligand.

[0014] The glucagon superfamily peptide (Q) in some embodiments can be a glucagon related peptide that exhibits agonist activity at the glucagon receptor, agonist activity at the GLP-1 receptor, agonist activity at the GIP receptor, co-agonist activity at the glucagon and GLP-1 receptors, co-agonist activity at the glucagon and GIP receptors, co-agonist activity at the GLP-1 and GIP receptors, or tri-agonist activity at the glucagon, GIP, and GLP-1 receptors. In some embodiments, the glucagon related peptide exhibits antagonist activity at the glucagon, GLP-1 or GIP receptor. The activity of the glucagon related peptide at the glucagon receptor, at the GLP-1 receptor, or at the GIP receptor can be in accordance with any of the teachings set forth herein. In some specific embodiments, the glucagon related peptide exhibits at least 0.1% activity of native glucagon at the glucagon receptor, at least 0.1% activity of native GLP-1 at the GLP-1 receptor, or at least 0.1% activity of native GIP at the GIP receptor.

[0015] The GR ligand (Y) is wholly or partly non-peptidic and acts at a glucocorticoid receptor with an activity in accordance with any of the teachings set forth herein. In some embodiments the GR ligand has an EC₅₀ or IC₅₀ of about 1 mM or less, or 100 μM or less, or 10 μM or less, or 1 μM or less. In some embodiments, the GR ligand has a molecular weight of up to about 5000 daltons, or up to about 2000 daltons, or up to about 1000 daltons, or up to about 500 daltons. The GR ligand may act at any of the glucocorticoid receptors described herein or have any of the structures described herein.

[0016] In some embodiments, the glucagon related peptide has an EC₅₀ (or IC₅₀) at the glucagon receptor within about 2000-fold, 1000-fold, 100-fold, or within about 75-fold, or within about 50-fold, or within about 40-, 30-, 25-, 20-, 15-, 10- or 5-fold of the EC₅₀ or IC₅₀ of the GR ligand at its glucocorticoid receptor. In some embodiments, the glucagon related peptide has an EC₅₀ (or IC₅₀) at the GLP-1 receptor within about 2000-fold, 1000-fold, 100-fold, or within about 75-fold, or within about 50-fold, or within about 40-, 30-, 25-, 20-, 15-, 10- or 5-fold of the EC₅₀ or IC₅₀ of the GR ligand at its glucocorticoid receptor. In some embodiments, the glucagon related peptide has an EC₅₀ (or IC₅₀) at the GIP receptor within about 2000-fold, 1000-fold, 100-fold, or within about 75-fold, or within about 50-fold, or within about 40-, 30-, 25-, 20-, 15-, 10- or 5-fold of the EC₅₀ or IC₅₀ of the GR ligand at its glucocorticoid receptor.

[0017] In some aspects of the invention, prodrugs of Q-L-Y are provided wherein the prodrug comprises a dipeptide prodrug element (A-B) covalently linked to an active site of Q via an amide linkage. Subsequent removal of the dipeptide under physiological conditions and in the absence of enzymatic activity restores full activity to the Q-L-Y conjugate.

[0018] In some aspects of the invention, pharmaceutical compositions comprising the Q-L-Y conjugate and a pharmaceutically acceptable carrier are also provided.

[0019] In other aspects of the invention, methods are provided for administering a therapeutically effective amount of a Q-L-Y conjugate described herein for treating a disease or medical condition in a patient. In some embodiments, the disease or medical condition is selected from the group consisting of metabolic syndrome, diabetes, obesity, liver steatosis, and a neurodegenerative disease.

[0020] GR ligands include cortisol and derivatives thereof, and refers to compounds, either naturally occurring or synthesized, of Formula C:

[chemical structure]

wherein R², R³, R⁶, R⁷, R⁸, R⁹, and R¹⁰ are each independently moieties that permit or promote agonist or antagonist activity upon the binding of the compound of Formula C to a nuclear hormone receptor or glucocorticoid receptor; and each dash represents an optional double bond. In some embodiments, the structure of Formula C is substituted with one or more substituents at one or more positions of the tetracyclic ring, such as, for example, positions 1, 2, 4, 5, 6, 7, 8, 11, 12, 14, and 15. Specific, nonlimiting examples of derivatives of cortisol and derivatives thereof include cortisol, cortisone acetate, beclometasone, prednisone, prednisolone, methylprednisolone, betamethasone, trimcinolone, and dexamethasone.

### BRIEF DESCRIPTION OF THE DRAWINGS

[0021] FIG. 1 presents an alignment of the amino acid sequences of various glucagon superfamily peptides or relevant fragments thereof. The amino acid sequence presented are GHRH (SEQ ID NO: 1619), PHI (SEQ ID NO: 1622), VIP (SEQ ID NO: 1620), PACAP-27 (SEQ ID NO: 1621), Exendin-4 (SEQ ID NO: 1618), GLP-1 (SEQ ID NO: 1603), Glucagon (SEQ ID NO: 1601), Oxyntomodulin (SEQ ID NO: 1606), GIP (SEQ ID NO: 1607), GLP-2 (SEQ ID NO: 1608) and Secretin (SEQ ID NO: 1624). The alignment shows how amino acid positions of glucagon can correspond to amino acid positions in other glucagon superfamily peptides.

[0022] FIGS. 2a-2c illustrate the effect of administration of the indicated GLP-1 conjugates on change in body weight and blood glucose levels in db/db mice. FIG. 2a illustrates that mice that were administered a high dose of the GLP-1(Aib²A²²CexK⁴⁰)/Estrogen(17-ester) conjugate experienced a slightly greater decrease in body weight than mice that were administered GLP-1 alone, but similar to vehicle. FIGS. 2b and 2c show mice that were administered a high dose of the GLP-1(Aib²A²²CexK⁴⁰)/Estrogen(17-ester) conjugate experienced the greatest decrease in blood glucose levels between days 0 and 14, demonstrating that the enhanced ability to improve glucose independent of a change in body weight.

[0023] FIGS. 3a-3e illustrate the effect of administration of the indicated GLP-1 conjugates on blood glucose, body weight, fat mass, and lean muscle mass in diet induced obese mice. FIG. 3a illustrates the results of an ipGTT test on day 21. FIGS. 3b-d illustrate the effect of administration of the indicated GLP-1 conjugates on the change in body weight (FIG. 3b), change in fat mass (FIG. 3c), and change in lean muscle mass (FIG. 3d) in diet induced obese mice. Mice that were administered a high dose of the GLP-1(Aib²A²²CexK⁴⁰)/Estrogen(17-ester) conjugate experienced the greatest decrease in body weight, and fat mass, and the least amount of change in lean muscle mass. FIG. 3e illustrates the effect of administration of the indicated GLP-1 conjugates on changes in blood glucose in diet induced obese mice. Mice that were administered a high dose of the GLP-1(Aib²A²²CexK⁴⁰)/Estrogen(17-ester) conjugate experienced the greatest decrease in blood glucose levels between days 0 and 14. These results demonstrate the added dose dependent efficacy of adding estrogen to a weak A22-based GLP-1 agonist.

[0024] FIGS. 4a-4d illustrate the effect of administration of the indicated GLP-1 conjugates on blood glucose levels, change in body weight, change in fat mass, and change in blood glucose. FIG. 4a illustrates the effect of administration of the indicated GLP-1 conjugates in an intraperitoneal glucose tolerance test on blood glucose levels in diet induced obese mice after fourteen daily doses. FIGS. 4b-c illustrate the effect of administration of the indicated GLP-1 conjugates on the change in body weight and change in fat mass in diet induced obese mice. Mice that were administered a high dose of the GLP-1/Estrogen conjugates experienced the greatest decrease in total body weight (FIG. 4b). Fat mass was decreased in the high dose estrogen ether conjugate relative to vehicle-treated animals (FIG. 4c). FIG. 4d illustrates the effect of administration of the indicated GLP-1 conjugates on changes in blood glucose in diet induced obese mice. At the high dose, mice that were administered either GLP-1 (Aib²E¹⁶Cex K⁴⁰)/Estrogen conjugate experienced a greater change in blood glucose levels between days 0 and 21 than mice that were administered GLP-1(Aib²E¹⁶Cex K⁴⁰) alone.

[0025] FIGS. 5a-5b illustrate the effect of administration of the indicated GLP-1 conjugates on change in body weight and change in blood glucose in diet induced obese mice. Mice that were administered a high dose of the GLP-1/Estrogen conjugates experienced the greatest decrease in body weight (FIG. 5a). Mice that were administered either high or low doses of GLP-1(Aib²E¹⁶K⁴⁰Cex) experienced the greatest change in blood glucose, along with that of the high does GLP-1(Aib²E¹⁶K⁴⁰Cex)/estrogen(3-ether) (FIG. 5b).

[0026] FIGS. 6a-6c illustrate the effect of administration of the indicated GLP-1 conjugates on the change in body weight, fat mass, and changes in blood glucose in diet induced obese mice. Mice that were administered either estrogen conjugate experienced the greatest decrease in total body weight (FIG. 6a). The analysis of fat mass (FIG. 6b) was relatively constant with total loss in body weight. Mice that were administered a GLP-1(Aib²E¹⁶K⁴⁰Cex)/Estrogen(3-ether) or a GLP-1(Aib²E¹⁶K⁴⁰Cex)/Estrogen(17-ester) conjugate experienced the greatest change in blood glucose levels between days 0 and 7 (FIG. 6c).

[0027] FIGS. 7a-7b illustrate the effect of administration of the indicated GLP-1 conjugates on the change in body weight and blood glucose in diet induced obese mice. Mice that were administered the GLP-1(Aib²E¹⁶K⁴⁰Cex)/Estrogen conjugates experienced the greatest decrease in total body weight (FIG. 7a) and blood glucose levels (FIG. 7b) over a period of 7 days. Neither the A22 or the d-amino acid containing peptides demonstrated much lowering relative to the GLP-1(Aib²E¹⁶Cex K⁴⁰)/Estrogen conjugates. Additionally, the estrogen conjugates of GLP-1(Aib²E¹⁶Cex K⁴⁰) were clearly more effective than the non-estrogen form of the same peptide

[0028] FIGS. 8a-8c illustrate the effect of the administration of the indicated GLP-1 conjugates on change in body weight, blood glucose, and fat mass. The d-amino acid containing peptides were clearly inferior in all measures of efficacy to the 1-amino acid containing peptides. FIG. 8a illustrates the effect of administration of the indicated GLP-1 conjugates on the change body weight in diet induced obese mice. There was little apparent difference in body weight lowering at these doses for the peptides with and without the estrogen. Nonetheless, in FIG. 8b effect of administration of the indicated GLP-1 conjugates on the change in blood glucose in diet induced obese mice are shown. Mice that were administered the GLP-1(Aib²E¹⁶Cex K⁴⁰)/Estrogen(3-ester) conjugate experienced the greatest change in blood glucose levels between days 0 and 7 in vivo, far more than the animals treated with the same peptide but without estrogen. This demonstrated the direct improvement in blood glucose independent of a difference in body weight. FIG. 8c illustrates the effect of the administration of the indicated GLP-1 conjugates on change in fat mass.

[0029] FIGS. 9a-9c illustrate the effect of administration of the indicated GLP-1 conjugates on the change in body weight, amount of fat mass, and change in blood glucose in diet induced obese mice. Mice that were administered the d-amino acid containing GLP-1/Estrogen(3-ester) conjugate at elevated doses relative to the control 1-containing amino acid experienced the greatest decrease in body weight (FIG. 9a) and had the least amount of fat mass (FIG. 9b). There was clear dose dependent glucose lowering in the d-amino acid containing GLP-1/Estrogen(3-ester) conjugate between days 0 and 7 and enhanced at the highest dose relative to mice that were administered GLP-1 alone (FIG. 9c).

[0030] FIGS. 10a-10b illustrate the effect of administration of the indicated GLP-1 conjugates on the change in body weight and change in blood glucose levels in diet induced obese mice. Mice that were administered the d-amino acid containing GLP-1/Estrogen conjugates where the estrogen was covalently linked as either a stable amide or ester that was unstable in vivo. The animals treated with the unstable ester conjugate experienced the greatest decrease in total body weight (FIG. 10a). FIG. 10b illustrates that mice administered the d-amino acid containing GLP-1/Estrogen ester conjugate experienced a greater change in blood glucose levels between days 0 and 7 than mice that were administered a comparable d-amino acid containing peptide but with a stable estrogen conjugate.

[0031] FIGS. 11a-11b illustrate the activity of the indicated conjugates at the GLP-1 receptor and the estrogen receptor. The active, metastable GLP-1/estrogen conjugates were equally active at the GLP-1 receptor (FIG. 11a), and had variable activity at the estrogen receptor (FIG. 11b).

[0032] FIGS. 12a-12e illustrate the effect of administration of the indicated GLP-1 conjugates on the change in body weight, food intake, blood glucose, liver weight, and uterus weight in diet induced obese mice. Mice that were administered an inactive, estrogen-labile d-amino acid containing GLP-1/Estrogen(3-ester) conjugate experienced the greatest decrease in body weight, with the effect more pronounced at a high dose (FIG. 12a). FIG. 12b illustrates that mice that were administered the inactive, estrogen-labile d-amino acid containing GLP-1/Estrogen(3-ester) conjugate consumed significantly less food than mice that were administered inactive d-amino acid containing GLP-1 alone or an estrogen-stable d-amino acid containing GLP-1/Estrogen(3-ether) conjugate, with the effect more pronounced at a high dose. FIG. 12c shows that a high dose of the estrogen-labile, inactive d-amino acid containing GLP-1/Estrogen(3-ester) conjugate lowers blood glucose levels relative to vehicle treated animals. FIG. 12d shows that mice that were administered the estrogen-labile, inactive d-amino acid containing GLP-1/Estrogen(3-ether) conjugate experienced a subtle but greater decrease in liver weight than mice that were administered the estrogen-stable, inactive d-amino acid containing GLP-1/Estrogen(3-ether) conjugate. FIG. 12e shows that mice that were administered the inactive, estrogen-labile d-amino acid containing GLP-1/Estrogen(3-ester) conjugate experienced a significantly greater increase in uterus weight than mice that were administered inactive GLP-1 alone or the inactive, estrogen-stable d-amino acid containing GLP-1/Estrogen(3-ether) conjugate.

[0033] FIGS. 13a-13e illustrate the effect of administration of the indicated GLP-1 conjugates on the change in body weight, fat mass, food intake, blood glucose levels, and uterine weight of ovariectomized mice. FIG. 13a shows that mice that were administered the active, estrogen-stable GLP-1 agonist/Estrogen(3-ether) conjugate experienced a greater decrease in body weight than mice that were administered the active, GLP-1 agonist alone, the inactive, estrogen-labile d-amino acid containing GLP-1/Estrone(3-ester) conjugate, or the inactive, estrogen-stable d-amino acid containing GLP-1/Estrogen(3-ether) conjugate. FIG. 13b shows that mice that were administered the GLP-1 agonist, the inactive, estrogen-labile d-amino acid containing GLP-1/Estrone(3-ester) conjugate, and the active, estrogen-stable GLP-1 agonist/Estrogen(3-ether) conjugate exhibited a decrease in fat mass. FIG. 13c shows that mice that were administered the active, estrogen-stable GLP-1 agonist/Estrogen(3-ether) conjugate consumed less food than mice that were administered the active, GLP-1 agonist alone, the inactive, estrogen-labile d-amino acid containing GLP-1/Estrone(3-ester) conjugate, or the inactive, estrogen-stable d-amino acid containing GLP-1/Estrogen(3-ether) conjugate. FIG. 13d shows that mice that were administered the inactive, estrogen-labile d-amino acid containing GLP-1/Estrone(3-ester) conjugate, or inactive, estrogen-stable d-amino acid containing GLP-1/Estrogen(3-ether) conjugate, or the active, estrogen-stable GLP-1 agonist/Estrogen(3-ether) conjugate experienced a decrease in blood glucose levels greater than vehicle, and that mice that were administered the inactive, estrogen-stable d-amino acid containing GLP-1/Estrogen(3-ether) conjugate did not exhibit a decrease in blood glucose levels. FIG. 13e shows that mice that were administered the inactive, estrogen-labile d-amino acid containing GLP-1/Estrone(3-ester) conjugate experienced a significantly greater increase in uterus weight than mice that were administered GLP-1 alone, the inactive, estrogen-stable d-amino acid containing GLP-1/Estrogen(3-ether) conjugate, or the active, estrogen-stable GLP-1/Estrogen(3-ether) conjugate.

[0034] FIGS. 14a-14d illustrate the effect of administration of the indicated GLP-1 conjugates on the change in body weight, fat mass, blood glucose, and uterine weight of ovariectomized mice. Mice that were administered the metastable GLP-1 agonist/Estrogen conjugates experienced a greater decrease in body weight and fat mass than mice that were administered the active, GLP-1 agonist alone or the active, estrogen-labile GLP-1 agonist/Estrone(3-ester) conjugate (FIGS. 14a and 14b). Mice that were administered the metastable enzyme- and acid-labile conjugates, GLP-1 agonist/Estrogen(17-cathepsin) and GLP-1 agonist/Estrogen(17-hydrazone), respectively, initially had the greatest decrease in body weight, while the metastable thiol reduction-labile conjugate, GLP-1 agonist/Estrogen(17-carbamate disulfide), exhibited the overall greatest decrease in body weight. FIG. 14c shows that mice that were administered the metastable thiol reduction- and acid-labile conjugates, GLP-1 agonist/Estrogen(17-carbamate disulfide) and GLP-1 agonist/Estrogen(17-hydrazone), respectively, experienced a greater decrease in blood glucose levels than the estrogen-labile GLP-1 agonist/Estrone(3-ester) conjugate. FIG. 14d shows that mice that were administered the estrogen-labile GLP-1/Estrone(3-ester) conjugate experienced a significantly greater increase in uterus weight than mice that were administered any of the three metastable GLP-1/Estrogen conjugates.

[0035] FIGS. 15a-15b illustrate the effect of administration of the indicated GLP-1 conjugates on the change in body weight and cumulative food intake. Mice that were administered the active, estrogen-stable GLP-1 agonist/Estrogen(3-ether) conjugate experienced a significantly greater decrease in body weight than mice that were administered the active, GLP-1 agonist alone or the active, estrogen-labile GLP-1 agonist/Estrogen(3-ester) conjugate (FIG. 15a). FIG. 15b shows that mice that were administered the active, estrogen-stable GLP-1 agonist/Estrogen(3-ether) conjugate consumed significantly less food than mice that were administered the active, GLP-1 agonist alone or the active, estrogen-labile GLP-1 agonist/Estrogen(3-ester) conjugate.

[0036] FIGS. 16a-e depict HPLC profiles that illustrate the stability of the indicated GLP-1/Estrogen conjugates in human plasma at 37° C. The estrogen-stable GLP-1/Estrogen(3-ether) conjugates exhibited no estrogen release over 72 hours, while the estrogen-labile GLP-1/Estrogen(3-ester) conjugates showed substantial estrogen release after 3 hours and complete estrogen release within 6 hours.

[0037] FIGS. 17a-c illustrate the effect of administration of the indicated conjugates on the change in body weight percentage, cumulative food intake, and blood glucose levels of diet-induced obesity mice.

[0038] FIGS. 18a-c illustrate the effect of administration of the indicated conjugates on the change in body weight percentage, cumulative food intake, and blood glucose levels on diet-induced obesity wild type mice, estrogen receptor beta knock-out (ERβ KO) mice, and estrogen receptor alpha knock-out (ERα KO) mice.

[0039] FIG. 19 illustrates the effect of the indicated GLP-1 conjugates on blood glucose levels with time. Mice that were administered the GLP-1 agonist showed the least effective lowering of blood glucose over 48 hours (except for vehicle), while mice that were administered the estrogen-stable GLP-lagonist/Estrogen(3-ether) conjugate showed the most effective decrease in blood glucose over 48 hours.

[0040] FIG. 20 illustrates a synthesis scheme for generating a GLP-1 agonist/dexamethasone conjugate with a carbamate-β-alanine linker.

[0041] FIG. 21 illustrates the GLP-1 agonist/dexamethasone conjugate synthesized according to the scheme illustrated in FIG. 20.

[0042] FIG. 22 illustrates a synthesis scheme for generating a GLP-1 agonist/dexamethasone conjugate via hydrazine conjugation.

[0043] FIG. 23 illustrates the GLP-1 agonist/dexamethasone conjugate synthesized according to the scheme illustrated in FIG. 22.

[0044] FIG. 24 illustrates the effect of the indicated GLP-1 conjugates on glucocorticoid receptor-mediated luciferase induction.

[0045] FIGS. 25a-25b illustrates GLP-1 (FIG. 25a) and glucocorticoid (FIG. 25b) receptor activity assays using the indicated GLP-1 conjugates

[0046] FIG. 26 illustrates glucocorticoid receptor activity assays using the indicated GLP-1 conjugates.

### DETAILED DESCRIPTION OF THE INVENTION

### Definitions

[0047] In describing and claiming the invention, the following terminology will be used in accordance with the definitions set forth below.

[0048] The term “about” as used herein means greater or lesser than the value or range of values stated by 10 percent, but is not intended to designate any value or range of values to only this broader definition. Each value or range of values preceded by the term “about” is also intended to encompass the embodiment of the stated absolute value or range of values.

[0049] As used herein, the term “pharmaceutically acceptable carrier” includes any of the standard pharmaceutical carriers, such as a phosphate buffered saline solution, water, emulsions such as an oil/water or water/oil emulsion, and various types of wetting agents. The term also encompasses any of the agents approved by a regulatory agency of the US Federal government or listed in the US Pharmacopeia for use in animals, including humans.

[0050] As used herein the term “pharmaceutically acceptable salt” refers to salts of compounds that retain the biological activity of the parent compound, and which are not biologically or otherwise undesirable. Many of the compounds disclosed herein are capable of forming acid and/or base salts by virtue of the presence of amino and/or carboxyl groups or groups similar thereto.

[0051] Pharmaceutically acceptable base addition salts can be prepared from inorganic and organic bases. Salts derived from inorganic bases, include by way of example only, sodium, potassium, lithium, ammonium, calcium and magnesium salts. Salts derived from organic bases include, but are not limited to, salts of primary, secondary and tertiary amines. Pharmaceutically acceptable acid addition salts may be prepared from inorganic and organic acids. Salts derived from inorganic acids include hydrochloric acid, hydrobromic acid, sulfuric acid, nitric acid, phosphoric acid, and the like. Salts derived from organic acids include acetic acid, propionic acid, glycolic acid, pyruvic acid, oxalic acid, malic acid, malonic acid, succinic acid, maleic acid, fumaric acid, tartaric acid, citric acid, benzoic acid, cinnamic acid, mandelic acid, methanesulfonic acid, ethanesulfonic acid, p-toluene-sulfonic acid, salicylic acid, and the like.

[0052] As used herein, the term “treating” includes prophylaxis of the specific disorder or condition, or alleviation of the symptoms associated with a specific disorder or condition and/or preventing or eliminating said symptoms. For example, as used herein the term “treating diabetes” will refer in general to altering glucose blood levels in the direction of normal levels and may include increasing or decreasing blood glucose levels depending on a given situation.

[0053] As used herein an “effective” amount or a “therapeutically effective amount” of a glucagon peptide refers to a nontoxic but sufficient amount of the peptide to provide the desired effect. For example one desired effect would be the prevention or treatment of hypoglycemia, as measured, for example, by an increase in blood glucose level. An alternative desired effect for the glucagon peptides of the present disclosure would include treating hyperglycemia, e.g., as measured by a change in blood glucose level closer to normal, or inducing weight loss/preventing weight gain, e.g., as measured by reduction in body weight, or preventing or reducing an increase in body weight, or normalizing body fat distribution. The amount that is “effective” will vary from subject to subject, depending on the age and general condition of the individual, mode of administration, and the like. Thus, it is not always possible to specify an exact “effective amount.” However, an appropriate “effective” amount in any individual case may be determined by one of ordinary skill in the art using routine experimentation.

[0054] The term, “parenteral” means not through the alimentary canal but by some other route, e.g., subcutaneous, intramuscular, intraspinal, or intravenous.

[0055] As used herein the term “patient” without further designation is intended to encompass any warm blooded vertebrate domesticated animal (including for example, but not limited to livestock, horses, cats, dogs and other pets), mammals, and humans.

[0056] The term “isolated” as used herein means having been removed from its natural environment. In some embodiments, the analog is made through recombinant methods and the analog is isolated from the host cell.

[0057] The term “purified,” as used herein relates to the isolation of a molecule or compound in a form that is substantially free of contaminants normally associated with the molecule or compound in a native or natural environment and means having been increased in purity as a result of being separated from other components of the original composition. The term “purified polypeptide” is used herein to describe a polypeptide which has been separated from other compounds including, but not limited to nucleic acid molecules, lipids and carbohydrates.

[0058] As used herein, the term “peptide” encompasses a sequence of 2 or more amino acids and typically less than 50 amino acids, wherein the amino acids are naturally occurring or coded or non-naturally occurring or non-coded amino acids. Non-naturally occurring amino acids refer to amino acids that do not naturally occur in vivo but which, nevertheless, can be incorporated into the peptide structures described herein. “Non-coded” as used herein refer to an amino acid that is not an L-isomer of any of the following 20 amino acids: Ala, Cys, Asp, Glu, Phe, Gly, His, Ile, Lys, Leu, Met, Asn, Pro, Gln, Arg, Ser, Thr, Val, Trp, Tyr.

[0059] As used herein, “partly non-peptidic” refers to a molecule wherein a portion of the molecule is a chemical compound or substituent that has biological activity and that does not comprises a sequence of amino acids.

[0060] As used herein, “non-peptidic” refers to a molecule has biological activity and that does not comprise a sequence of amino acids.

[0061] As used herein, the terms “polypeptide” and “protein” are terms that are used interchangeably to refer to a polymer of amino acids, without regard to the length of the polymer. Typically, polypeptides and proteins have a polymer length that is greater than that of “peptides.” In some instances, a protein comprises more than one polypeptide chain covalently or noncovalently attached to each other.

[0062] Throughout the application, all references to a particular amino acid position by number (e.g., position 28) refer to the amino acid at that position in native glucagon (SEQ ID NO: 1601) or the corresponding amino acid position in any analogs thereof. For example, a reference herein to “position 28” would mean the corresponding position 27 for an analog of glucagon in which the first amino acid of SEQ ID NO: 1601 has been deleted. Similarly, a reference herein to “position 28” would mean the corresponding position 29 for a analog of glucagon in which one amino acid has been added before the N-terminus of SEQ ID NO: 1601.

[0063] As used herein an “amino acid modification” refers to (i) a substitution or replacement of an amino acid of the reference peptide (e.g. SEQ ID NOs: 1601, 1603, 1607) with a different amino acid (naturally-occurring or coded or non-coded or non-naturally-occurring amino acid), (ii) an addition of an amino acid (naturally-occurring or coded or non-coded or non-naturally-occurring amino acid) to the reference peptide (e.g. SEQ ID NOs: 1601, 1603, 1607) or (iii) a deletion of one or more amino acids from the reference peptide (e.g. SEQ ID NOs: 1601, 1603, 1607).

[0064] In some embodiments, the amino acid substitution or replacement is a conservative amino acid substitution, e.g., a conservative substitution of the amino acid at one or more of positions 1, 2, 5, 7, 8, 10, 11, 12, 13, 14, 16, 17, 18, 19, 20, 21, 24, 27, 28 or 29. As used herein, the term “conservative amino acid substitution” is the replacement of one amino acid with another amino acid having similar properties, e.g., size, charge, hydrophobicity, hydrophilicity, and/or aromaticity, and includes exchanges within one of the following five groups:

[0065] I. Small aliphatic, nonpolar or slightly polar residues:
[0066] Ala, Ser, Thr, Pro, Gly;

[0067] II. Polar, negative-charged residues and their amides and esters:
[0068] Asp, Asn, Glu, Gln, cysteic acid and homocysteic acid;

[0069] III. Polar, positive-charged residues:
[0070] His, Arg, Lys; Ornithine (Orn)

[0071] IV. Large, aliphatic, nonpolar residues:
[0072] Met, Leu, Ile, Val, Cys, Norleucine (Nle), homocysteine

[0073] V. Large, aromatic residues:
[0074] Phe, Tyr, Trp, acetyl phenylalanine

[0075] In some embodiments, the amino acid substitution is not a conservative amino acid substitution, e.g., is a non-conservative amino acid substitution.

[0076] As used herein the term “amino acid” encompasses any molecule containing both amino and carboxyl functional groups, wherein the amino and carboxyl groups are attached to the same carbon (the alpha carbon). The alpha carbon optionally may have one or two further organic substituents. For the purposes of the present disclosure designation of an amino acid without specifying its stereochemistry is intended to encompass either the L or D form of the amino acid, or a racemic mixture. However, in the instance where an amino acid is designated by its three letter code and includes a superscript number (i.e., Lys⁻¹), such a designation is intended to specify the native L form of the amino acid, whereas the D form will be specified by inclusion of a lower case d before the three letter code and superscript number (i.e., dLys⁻¹).

[0077] As used herein the term “hydroxyl acid” refers to an amino acid that has been modified to replace the alpha carbon amino group with a hydroxyl group.

[0078] As used herein the term “charged amino acid” refers to an amino acid that comprises a side chain that has a negative charge (i.e., deprotonated) or positive charge (i.e., protonated) in aqueous solution at physiological pH. For example negative-charged amino acids include aspartic acid, glutamic acid, cysteic acid, homocysteic acid, and homoglutamic acid, whereas positive-charged amino acids include arginine, lysine and histidine. Charged amino acids include the charged amino acids among the 20 coded amino acids, as well as atypical or non-naturally occurring or non-coded amino acids.

[0079] As used herein the term “acidic amino acid” refers to an amino acid that comprises a second acidic moiety (other than the alpha carboxylic acid of the amino acid), including for example, a side chain carboxylic acid or sulfonic acid group.

[0080] As used herein an “acylated” amino acid is an amino acid comprising an acyl group which is non-native to a naturally-occurring amino acid, regardless by the means by which it is produced. Exemplary methods of producing acylated amino acids and acylated peptides are known in the art and include acylating an amino acid before inclusion in the peptide or peptide synthesis followed by chemical acylation of the peptide. In some embodiments, the acyl group causes the peptide to have one or more of (i) a prolonged half-life in circulation, (ii) a delayed onset of action, (iii) an extended duration of action, (iv) an improved resistance to proteases, such as DPP-IV, and (v) increased potency at the glucagon superfamily peptide receptor.

[0081] As used herein, an “alkylated” amino acid is an amino acid comprising an alkyl group which is non-native to a naturally-occurring amino acid, regardless of the means by which it is produced. Exemplary methods of producing alkylated amino acids and alkylated peptides are known in the art and including alkylating an amino acid before inclusion in the peptide or peptide synthesis followed by chemical alkylation of the peptide. Without being held to any particular theory, it is believed that alkylation of peptides will achieve similar, if not the same, effects as acylation of the peptides, e.g., a prolonged half-life in circulation, a delayed onset of action, an extended duration of action, an improved resistance to proteases, such as DPP-IV, and increased potency at the glucagon superfamily peptide receptor.

[0082] The term “C₁-Cₙ alkyl” wherein n can be from 1 through 18, as used herein, represents a branched or linear alkyl group having from one to the specified number of carbon atoms. For example, C₁-C₆ alkyl represents a branched or linear alkyl group having from 1 to 6 carbon atoms. Typical C₁-C₁₈ alkyl groups include, but are not limited to, methyl, ethyl, n-propyl, iso-propyl, butyl, iso-butyl, sec-butyl, tert-butyl, pentyl, hexyl and the like. Alkyl groups optionally can be substituted, for example, with hydroxy (OH), halo, aryl, carboxyl, thio, C₃-C₈ cycloalkyl, and amino.

[0083] The term “C₀-Cₙ alkyl” wherein n can be from 1-18, as used herein, represents a branched or linear alkyl group having up to 18 carbon atoms. For example, the term “(C₀-C₆ alkyl)OH” represents a hydroxyl parent moiety attached to an alkyl substituent having up to 6 carbon atoms (e.g. —OH, —CH₂OH, —C₂H₄OH, —C₃H₆OH, —C₄H₈OH, —C₅H₁₀OH, —C₆H₁₂OH).

[0084] The term “C₂-Cₙ alkenyl” wherein n can be from 2 through 18, as used herein, represents an unsaturated branched or linear group having from 2 to the specified number of carbon atoms and at least one double bond. Examples of such groups include, but are not limited to, 1-propenyl, 2-propenyl (—CH₂—CH═CH₂), 1,3-butadienyl, (—CH═CHCH═CH₂), 1-butenyl (—CH═CHCH₂CH₃), hexenyl, pentenyl, and the like. Alkenyl groups optionally can be substituted, for example, with hydroxy (OH), halo, aryl, carboxyl, thio, C₃-C₈ cycloalkyl, and amino.

[0085] The term “C₂-Cₙ alkynyl” wherein n can be from 2 to 18, refers to an unsaturated branched or linear group having from 2 to n carbon atoms and at least one triple bond. Examples of such groups include, but are not limited to, 1-propynyl, 2-propynyl, 1-butynyl, 2-butynyl, 1-pentynyl, and the like. Alkynyl groups optionally can be substituted, for example, with hydroxy (OH), halo, aryl, carboxyl, thio, C₃-C₈ cycloalkyl, and amino.

[0086] As used herein the term “aryl” refers to a monocyclic or polycyclic (for example, bicyclic, tricyclic, or tetracyclic) aromatic groups. The size of the aryl ring or rings is indicated by designating the number of carbons present. For example, the term “(C₁-C₃ alkyl)(C₆-C₁₀ aryl)” refers to a 6 to 10 membered aryl that is attached to a parent moiety via a one to three membered alkyl chain. Unless otherwise indicated, an aryl group can be unsubstituted or substituted with one or more, and in particular one to five groups independently selected from, for example, halo, alkyl, alkenyl, OCF₃, NO₂, CN, NC, OH, alkoxy, amino, CO₂H, C₃-Cₛ cycloalkyl, C(O)Oalkyl, aryl, and heteroaryl. Exemplary aryl groups include, but are not limited to, phenyl, naphthyl, tetrahydronaphthyl, chlorophenyl, indanyl, indenyl, methylphenyl, methoxyphenyl, trifluoromethylphenyl, nitrophenyl, 2,4-methoxychlorophenyl, and the like.

[0087] As used herein, the term “heteroaryl” refers to a monocyclic or polycyclic ring system containing one or more aromatic rings and containing at least one nitrogen, oxygen, or sulfur atom in an aromatic ring. The size of the heteroaryl ring and the presence of substituents or linking groups are indicated by designating the number of carbons present. For example, the term “(C₁-C₆ alkyl)(C₅-C₆ heteroaryl)” refers to a 5 or 6 membered heteroaryl that is attached to a parent moiety via a one to 6 membered alkyl chain. Unless otherwise indicated, a heteroaryl group can be unsubstituted or substituted with one or more, and in particular one to five groups independently selected from, for example, halo, alkyl, alkenyl, OCF₃, NO₂, CN, NC, OH, alkoxy, amino, CO₂H, C₃-C₈ cycloalkyl, C(O)Oalkyl, aryl, and heteroaryl. Examples of heteroaryl groups include, but are not limited to, thienyl, furyl, pyridyl, oxazolyl, quinolyl, thiophenyl, isoquinolyl, indolyl, triazinyl, triazolyl, isothiazolyl, isoxazolyl, imidazolyl, benzothiazolyl, pyrazinyl, pyrimidinyl, thiazolyl, and thiadiazolyl.

[0088] As used herein, the term “heteroalkyl” refers to a linear or branched hydrocarbon containing the indicated number of carbon atoms and at least one heteroatom in the backbone of the structure. Suitable heteroatoms for purposes herein include but are not limited to N, S, and O. Heteroalkyl groups optionally can be substituted, for example, with hydroxy (OH), halo, aryl, carboxyl, and amino

[0089] As used herein, the term “halogen” or “halo” refers to one or more members of the group consisting of fluorine, chlorine, bromine, and iodine.

[0090] As used herein, the term “glucagon related peptide” refers to those peptides which have biological activity (as agonists or antagonists) at any one or more of the glucagon, GLP-1, GLP-2, and GIP receptors and comprise an amino acid sequence that shares at least 40% sequence identity (e.g., 45%, 50%, 55%, 60%, 65%, 70%, 75%, 80%, 85%, 90%, 95%) with at least one of native glucagon, native oxyntomodulin, native exendin-4, native GLP-1, native GLP-2, or native GIP. Unless otherwise stated, any reference to an amino acid position in a glucagon related peptide (e.g. for linkage of a GR ligand, a conjugate moiety, a hydrophilic polymer, acylation or alkylation) refers to the corresponding position relative to the native glucagon amino acid sequence (SEQ ID NO: 1601).

[0091] As used herein, the term “selectivity” of a molecule for a first receptor relative to a second receptor refers to the following ratio: EC₅₀ of the molecule at the second receptor divided by the EC₅₀ of the molecule at the first receptor. For example, a molecule that has an EC₅₀ of 1 nM at a first receptor and an EC₅₀ of 100 nM at a second receptor has 100-fold selectivity for the first receptor relative to the second receptor.

[0092] The term “identity” as used herein relates to the similarity between two or more sequences. Identity is measured by dividing the number of identical residues by the total number of residues and multiplying the product by 100 to achieve a percentage. Thus, two copies of exactly the same sequence have 100% identity, whereas two sequences that have amino acid deletions, additions, or substitutions relative to one another have a lower degree of identity. Those skilled in the art will recognize that several computer programs, such as those that employ algorithms such as BLAST (Basic Local Alignment Search Tool, Altschul et al. (1993) J. Mol. Biol. 215:403-410) are available for determining sequence identity.

[0093] As used herein, the term “glucagon superfamily peptide” refers to a group of peptides related in structure in their N-terminal and C-terminal regions (see, for example, Sherwood et al., Endocrine Reviews 21: 619-670 (2000)). Members of this group include all glucagon related peptides, as well as Growth Hormone Releasing Hormone (GHRH; SEQ ID NO: 1619), vasoactive intestinal peptide (VIP; SEQ ID NO: 1620), pituitary adenylate cyclase-activating polypeptide 27 (PACAP-27; SEQ ID NO: 1621), peptide histidine isoleucine (PHI; SEQ ID NO: 1642), peptide histidine methionine (PHM; SEQ ID NO: 1622), Secretin (SEQ ID NO: 1623), and analogs, derivatives or conjugates with up to 1, 2, 3, 4, 5, 6, 7, 8, 9 or 10 amino acid modifications relative to the native peptide. Such peptides preferably retain the ability to interact (agonist or antagonist) with receptors of the glucagon receptor superfamily. Unless otherwise stated, any reference to an amino acid position in a glucagon superfamily peptide (e.g. for linkage of a GR ligand, a conjugate moiety, a hydrophilic polymer, acylation or alkylation) refers to the corresponding position relative to the native glucagon amino acid sequence (SEQ ID NO: 1601), see FIG. 1 for an alignment of representative glucagon superfamily peptides.

[0094] The term “glucagon agonist peptide” refers to a compound that binds to and activates downstream signaling of the glucagon receptor. However, this term should not be construed as limiting the compound to having activity at only the glucagon receptor. Rather, the glucagon agonist peptides of the present disclosures may exhibit additional activities at other receptors, as further discussed herein. Glucagon agonist peptides, for example, may exhibit activity (e.g., agonist activity) at the GLP-1 receptor and/or the GIP receptor. Also, the term “glucagon agonist peptide” should not be construed as limiting the compound to only peptides. Rather, compounds other than peptides are encompassed by this term. Accordingly, the glucagon agonist peptide in some aspects is a peptide in conjugate form (a heterodimer, a multimer, a fusion peptide), a chemically-derivatized peptide, a pharmaceutical salt of a peptide, a peptidomimetic, and the like.

[0095] The term “GLP-1 agonist peptide” refers to a compound that binds to and activates downstream signaling of the GLP-1 receptor. However, this term should not be construed as limiting the compound to having activity at only the GLP-1 receptor. Rather, the GLP-1 agonist peptides of the present disclosures may exhibit additional activities at other receptors, as further discussed herein. GLP-1 agonist peptides, for example, may exhibit activity (e.g., agonist activity) at the glucagon receptor and/or the GIP receptor. Also, the term “GLP-1 agonist peptide” should not be construed as limiting the compound to only peptides. Rather, compounds other than peptides are encompassed by this term. Accordingly, the GLP-1 agonist peptide in some aspects is a peptide in conjugate form (a heterodimer, a multimer, a fusion peptide), a chemically-derivatized peptide, a pharmaceutical salt of a peptide, a peptidomimetic, and the like.

[0096] The term “GIP agonist peptide” refers to a compound that binds to and activates downstream signaling of the GIP receptor. However, this term should not be construed as limiting the compound to having activity at only the GIP receptor. Rather, the GIP agonist peptides of the present disclosures may exhibit additional activities at other receptors, as further discussed herein. GIP agonist peptides, for example, may exhibit activity (e.g., agonist activity) at the GLP-1 receptor. Also, the term “GIP agonist peptide” should not be construed as limiting the compound to only peptides. Rather, compounds other than peptides are encompassed by this term. Accordingly, the GIP agonist peptide in some aspects is a peptide in conjugate form (a heterodimer, a multimer, a fusion peptide), a chemically-derivatized peptide, a pharmaceutical salt of a peptide, a peptidomimetic, and the like.

[0097] The term “glucagon antagonist peptide” refers to a compound that counteracts glucagon activity or prevents glucagon function. For example, a glucagon antagonist exhibits at least 60% inhibition (e.g., at least 70%, 80%, 90% or more inhibition) of the maximum response achieved by glucagon at the glucagon receptor. In a specific embodiment, the glucagon antagonist at a concentration of about 1 μM exhibits less than about 20% of the maximum agonist activity achieved by glucagon at the glucagon receptor (e.g. less than about 10% or 5%). This term should not be construed as limiting the compound to having activity at only the glucagon receptor. Rather, the glucagon antagonist peptides of the present disclosures may exhibit additional activities at the glucagon receptor (e.g., partial agonism) or other receptor. Glucagon antagonist peptides, for example, may exhibit activity (e.g., agonist activity) at the GLP-1 receptor. Also, the term “glucagon antagonist peptide” should not be construed as limiting the compound to only peptides. Rather, compounds other than peptides are encompassed by these terms. Accordingly, in some aspects, the glucagon agonist peptide is a peptide in conjugate form, a chemically-derivatized peptide, a pharmaceutical salt of a peptide, a peptidomimetic, and the like.

[0098] The term “GLP-1 antagonist peptide” refers to a compound that counteracts GLP-1 activity or prevents GLP-1 function. For example, a GLP-1 antagonist exhibits at least 60% inhibition (e.g., at least 70%, 80%, 90% or more inhibition) of the maximum response achieved by GLP-1 at the GLP-1 receptor. In a specific embodiment, a GLP-1 antagonist at a concentration of about 1 μM exhibits less than about 20% of the maximum agonist activity achieved by GLP-1 at the GLP-1 receptor (e.g. less than about 10% or 5%). The term should not be construed as limiting the compound to having activity at only the GLP-1 receptor. Rather, the GLP-1 antagonist peptides of the present disclosures may exhibit additional activities at the GLP-1 receptor (e.g., partial agonism) or other receptor. GLP-1 antagonist peptides, for example, may exhibit activity (e.g., agonist activity) at the glucagon receptor. Also, the term “GLP-1 antagonist peptide” should not be construed as limiting the compound to only peptides. Rather, compounds other than peptides are encompassed by these terms. Accordingly, in some aspects, the GLP-1 agonist peptide is a peptide in conjugate form, a chemically-derivatized peptide, a pharmaceutical salt of a peptide, a peptidomimetic, and the like.

[0099] The term “GIP antagonist peptide” refers to a compound that counteracts GIP activity or prevents GIP-1 function. For example, a GIP antagonist exhibits at least 60% inhibition (e.g., at least 70%, 80%, 90% or more inhibition) of the maximum response achieved by GIP at the GIP receptor. In a specific embodiment, a GIP antagonist at a concentration of about 1 μM exhibits less than about 20% of the maximum agonist activity achieved by GIP at the GIP receptor (e.g. less than about 10% or 5%). The term should not be construed as limiting the compound to having activity at only the GIP receptor. Rather, the GIP antagonist peptides of the present disclosures may exhibit additional activities at the GIP receptor (e.g., partial agonism) or other receptor. GIP antagonist peptides, for example, may exhibit activity (e.g., agonist activity) at the glucagon receptor. Also, the term “GIP antagonist peptide” should not be construed as limiting the compound to only peptides. Rather, compounds other than peptides are encompassed by these terms. Accordingly, in some aspects, the GIP agonist peptide is a peptide in conjugate form, a chemically-derivatized peptide, a pharmaceutical salt of a peptide, a peptidomimetic, and the like.

[0100] As used herein, the terms “glucagon analog” and “glucagon peptide” can be used interchangeably to refer to an analog of glucagon that has the indicated activity at a glucagon related peptide receptor.

[0101] As used herein the term “native glucagon” refers to a peptide consisting of the sequence of SEQ ID NO: 1601.

[0102] As used herein, the term “native GLP-1” is a generic term that designates GLP-1(7-36) amide (SEQ ID NO: 1603), GLP-1(7-37) acid (SEQ ID NO: 1604) or a mixture of those two compounds.

[0103] As used herein, the term “native GIP” refers to a peptide consisting of SEQ ID NO: 1607.

[0104] As used herein, “glucagon potency” or “potency compared to native glucagon” of a molecule refers to the ratio of the EC₅₀ of the molecule at the glucagon receptor divided by the EC₅₀ of native glucagon at glucagon receptor.

[0105] As used herein, “GLP-1 potency” or “potency compared to native GLP-1” of a molecule refers to the ratio of the EC₅₀ of the molecule at GLP-1 receptor divided by the EC₅₀ of native GLP-1 at GLP-1 receptor.

[0106] As used herein, “GIP potency” or “potency compared to native GIP” of a molecule refers to the ratio of the EC₅₀ of the molecule at the GIP receptor divided by the EC₅₀ of native GIP at the GIP receptor.

[0107] As used herein, “NHR ligand” refers to a hydrophobic or lipophilic moiety that has biological activity (either agonist or antagonist) at a nuclear hormone receptor (NHR). The NHR ligand is wholly or partly non-peptidic. In some embodiments, the NHR ligand is an agonist that binds to and activates the NHR. In other embodiments, the NHR ligand is an antagonist. In some embodiments, the NHR ligand is an antagonist that acts by wholly or partially blocking binding of native ligand to the active site. In other embodiments, the NHR ligand is an antagonist that acts by binding to the active site or an allosteric site and preventing activation of, or de-activating, the NHR.

[0108] As used herein, “GR ligand” refers to a hydrophobic or lipophilic moiety that has biological activity (either agonist or antagonist) at a glucocorticoid receptor (GR). The GR ligand is wholly or partly non-peptidic. In some embodiments, the GR ligand is an agonist that binds to and activates the GR. In other embodiments, the GR ligand is an antagonist. In some embodiments, the GR ligand is an antagonist that acts by wholly or partially blocking binding of native ligand to the active site. In other embodiments, the GR ligand is an antagonist that acts by binding to the active site or an allosteric site and preventing activation of, or de-activating, the GR.

[0109] As used herein, “nuclear hormone receptors” (NHRs) refers to ligand-activated proteins that regulate gene expression within the cell nucleus, sometimes in concert with other co-activators and co-repressors.

[0110] As used herein, “cortisol and derivatives thereof” refers to compounds, either naturally occurring or synthesized, of Formula C:

[chemical structure]

wherein R², R³, R⁶, R⁷, R⁸, R⁹, and R¹⁰ are each independently moieties that permit or promote agonist or antagonist activity upon the binding of the compound of Formula C to a glucocorticoid receptor; and each dash represents an optional double bond. In some embodiments, the structure of Formula C is substituted with one or more substituents at one or more positions of the tetracyclic ring, such as, for example, positions 1, 2, 4, 5, 6, 7, 8, 11, 12, 14, and 15. Specific, nonlimiting examples of derivatives of cortisol and derivatives thereof include cortisol, cortisone acetate, beclometasone, prednisone, prednisolone, methylprednisolone, betamethasone, trimcinolone, and dexamethasone.

[0111] As used herein, “linking group” is a molecule or group of molecules that binds two separate entities to one another. Linking groups may provide for optimal spacing of the two entities or may further supply a labile linkage that allows the two entities to be separated from each other. Labile linkages include hydrolyzable groups, photocleavable groups, acid-labile moieties, base-labile moieties and enzyme cleavable groups.

[0112] As used herein, the term “prodrug” is defined as any compound that undergoes chemical modification before exhibiting its full pharmacological effects.

[0113] As used herein, a “dipeptide” is the result of the linkage of an α-amino acid or α-hydroxyl acid to another amino acid, through a peptide bond.

[0114] As used herein the term “chemical cleavage” absent any further designation encompasses a non-enzymatic reaction that results in the breakage of a covalent chemical bond.

### EMBODIMENTS

[0115] The present disclosures provide glucagon superfamily peptides conjugated with GR ligands. In some aspects, the GR ligands are capable of acting at glucocorticoid receptors involved in metabolism or glucose homeostasis, and the conjugate provides superior biological effects on metabolism or glucose homeostasis compared to the peptide alone or the GR ligand alone. Without being bound by a theory of the invention, the GR ligand may serve to target the glucagon superfamily peptide to particular types of cells or tissues; or alternatively the glucagon superfamily peptide may serve to target the GR ligand or enhance its transport into the cell, e.g. through binding of peptide to a receptor that internalizes the conjugate.

[0116] The glucagon superfamily peptide conjugates of the invention can be represented by the following formula:

Q-L-Y

wherein Q is a glucagon superfamily peptide, Y is a GR ligand, and L is a linking group or a bond.

[0117] The glucagon superfamily peptide (Q) in some embodiments can be a glucagon related peptide that exhibits agonist activity at the glucagon receptor, agonist activity at the GLP-1 receptor, agonist activity at the GIP receptor, co-agonist activity at the glucagon and GLP-1 receptors, co-agonist activity at the glucagon and GIP receptors, co-agonist activity at the GLP-1 and GIP receptors, or tri-agonist activity at the glucagon, GIP, and GLP-1 receptors. In some embodiments, the glucagon related peptide exhibits antagonist activity at the glucagon, GLP-1 or GIP receptor.

[0118] The glucagon superfamily peptide (Q) in some embodiments may be a glucagon-related peptide, Growth Hormone Releasing Hormone (GHRH; SEQ ID NO: 1619), vasoactive intestinal peptide (VIP; SEQ ID NO: 1620), Pituitary adenylate cyclase-activating polypeptide 27 (PACAP-27; SEQ ID NO: 1621), peptide histidine methionine (PHM; SEQ ID NO: 1622), or Secretin (SEQ ID NO: 1623), and/or and analogs, derivatives and conjugates thereof. Glucagon superfamily peptides may have common structural characteristics, including but not limited to homology within the N-terminal amino acids and/or alpha-helical structure within the C-terminal portion. It is believed that the C-terminus generally functions in receptor binding and the N-terminus generally functions in receptor signaling. A few amino acids in the N-terminal portion and C-terminal portion are highly conserved among members of the glucagon superfamily, for example, His1, Gly4, Phe6, Phe22, Val23, Trp25, and Leu26, with amino acids at these positions showing identity, conservative substitutions or similarity in amino acid side chains. In some embodiments the glucagon related peptide Q is glucagon (SEQ ID NO: 1601), oxyntomodulin (SEQ ID NO: 1606), exendin-4 (SEQ ID NO: 1618), Glucagon-like peptide-1 (GLP-1) (amino acids 7-37 provided as SEQ ID NOs: 1603 and 1604), Glucagon-like peptide-2 (GLP-2) (SEQ ID NO: 1608), GIP (SEQ ID NO: 1607) or analogs, derivatives and conjugates of the foregoing. In some embodiments Q as a glucagon related peptide comprises an amino acid sequence that is at least about 40%, 45%, 50%, 55%, 60%, 65%, 70%, 75%, 80%, 85%, 90%, or 95% identical to the corresponding sequence of native glucagon, native oxyntomodulin, native exendin-4, native (7-37)GLP-1, native GLP-2, or native GIP over the length of the native peptide (or over the positions which correspond to glucagon, see e.g., FIG. 1). In other embodiments, a glucagon superfamily peptide (Q) comprises an amino acid sequence of native glucagon, native exendin-4, native (7-37)GLP-1, native GLP-2, native GHRH, native VIP, native PACAP-27, native PHM, native oxyntomodulin, native secretin, or native GIP with up to 1, 2, 3, 4, 5, 6, 7, 8, 9 or 10 amino acid modifications. In still further embodiments, Q comprises an amino acid sequence which is a chimera of two or more native glucagon related peptide sequences. In some embodiments, Q comprises an amino acid sequence at least about 50% identical to native glucagon (SEQ ID NO: 1601) that retains the alpha-helix conformation of the amino acids corresponding to amino acids 12-29.

[0119] In related aspects, the invention provides peptide conjugates represented by the formula

Q-L-Y

wherein Q is osteocalcin, calcitonin, amylin, or an analog, derivative or conjugate thereof, rather than a glucagon superfamily peptide; Y is a GR ligand; and L is a linking group or a bond. In some embodiments, Q comprises osteocalcin (SEQ ID NO: 1644), or an amino acid sequence that is at least about 40%, 45%, 50%, 55%, 60%, 65%, 70%, 75%, 80%, 85%, 90%, or 95% identical to native osteocalcin over the length of the native peptide. Q may comprise an analog of osteocalcin with up to 1, 2, 3, 4, 5, 6, 7, 8, 9 or 10 amino acid modifications relative to native osteocalcin, or a truncated analog of osteocalcin (e.g., amino acids 70-84) with up to 1, 2, 3, 4, 5, 6, 7, 8, 9 or 10 amino acid modifications relative to the native truncated osteocalcin. In some embodiments, Q comprises calcitonin (SEQ ID NO: 1645), or an amino acid sequence that is at least about 40%, 45%, 50%, 55%, 60%, 65%, 70%, 75%, 80%, 85%, 90%, or 95% identical to native calcitonin over the length of the native peptide. Q may comprise an analog of calcitonin with up to 1, 2, 3, 4, 5, 6, 7, 8, 9 or 10 amino acid modifications relative to native calcitonin. In some embodiments, Q comprises amylin (SEQ ID NO: 1646), or an amino acid sequence that is at least about 40%, 45%, 50%, 55%, 60%, 65%, 70%, 75%, 80%, 85%, 90%, or 95% identical to native amylin over the length of the native peptide. Q may comprise an analog of amylin with up to 1, 2, 3, 4, 5, 6, 7, 8, 9 or 10 amino acid modifications relative to native amylin.

### The GR Ligand (Y)

[0120] In the present disclosures relating to Q-L-Y conjugates, Y is a ligand that acts at a glucocorticoid receptor. Nuclear hormone receptors such as GRs generally include at least one of a C4-type zinc finger DNA-Binding Domain (DBD) and/or a Ligand Binding Domain (LBD). The DBD functions to bind DNA in the vicinity of target genes, and the LBD binds and responds to its cognate hormone. “Classical Nuclear Hormone Receptors” possess both a DBD and a LBD (e.g. Estrogen receptor alpha), while other nuclear hormone receptors possess only a DBD (e.g. Knirps, ORD) or only a LBD (e.g. Short Heterodimer Partner (SHP)).

[0121] Nuclear hormone receptors can be divided into four mechanistic classes: Type I, Type II, Type III, and Type IV. Ligand binding to Type I receptors (NR3 Group) results in the dissociation of heat shock proteins (HSP) from the receptor, homodimerization of the receptor, translocation from the cytoplasm into the cell nucleus, and binding to inverted repeat hormone response elements (HRE's) of DNA. The nuclear receptor/DNA complex then recruits other proteins which transcribe DNA downstream from the HRE into messenger RNA. Type II receptors (NR1 Group) are retained in the nucleus and bind as heterodimers, usually with Retinoid X Receptors (RXR), to DNA. Type II nuclear hormone receptors are often complexed with corepressor proteins. Ligand binding to the Type II receptor causes dissociation of the corepressor and recruitment of coactivator proteins. Additional proteins are recruited to the nuclear receptor/DNA complex, which transcribe DNA into messenger RNA. Type III nuclear hormone receptors (NR2 Group) are orphan receptors that bind to direct repeat HRE's of DNA as homodimers. Type IV nuclear hormone receptors bind to DNA either as monomers or dimers. Type IV receptors are unique because a single DNA binding domain of the receptor binds to a single half site HRE. The NHR ligand can be a ligand that acts at any one or more of the Type I, Type II, Type III or Type IV nuclear hormone receptors (e.g. as an agonist or antagonist).

TABLE 1
Nuclear Hormone Receptor Superfamily

| | | | |
|---|---|---|---|
| | | | Endogenous |
| Nuclear Hormone Receptor | Species | Accession | Ligand |

NR1 Group

| | | | | |
|---|---|---|---|---|
| NR1A1 | Thyroid Hormone Receptor alpha (TRα) | Human | M24748 | Thyroid hormone |
| NR1A2 | Thyroid Hormone Receptor beta (TRβ) | Human | X04707 | |
| NR1B1 | Retinoic Acid Receptor alpha (RARα) | Human | X06538 | Vitamin A and |
| NR1B2 | Retinoic Acid Receptor beta (RARβ) | Human | Y00291 | related compounds |
| NR1B3 | Retinoic Acid Receptor gamma (RARγ) | Human | M57707 | |
| NR1C1 | Peroxisome Proliferator Activated Receptor alpha (PPARα) | Human | L02932 | Fatty acids, |
| NR1C2 | Peroxisome Proliferator Activated Receptor | Human | L07592 | prostaglandins |
| | beta/delta (PPARβ/δ) | | | |
| NR1C3 | Peroxisome Proliferator Activated Receptor gamma | Human | L40904 | |
| | (PPARγ) | | | |
| NR1D1 | Rev-ErbAα | Human | M24898 | Heme |
| NR1D2 | Rev-ErbAβ | Human | L31785 | |
| NR1F1 | RAR-related Orphan Receptor alpha (RORα) | Human | U04897 | Cholesterol, all- |
| NR1F2 | RAR-related Orphan Receptor beta (RORβ) | Human | Y08639 | trans retinoic acid |
| NR1F3 | RAR-related Orphan Receptor gamma (RORγ) | Human | U16997 | |
| NR1H2 | Liver X Receptor beta (LXRβ) | Human | U07132 | Oxysterol |
| NR1H3 | Liver X Receptor alpha (LXRα) | Human | U22622 | |
| NR1H4 | Farnesoid X Receptor (FXR) | Human | U68233 | |
| NR1I1 | Vitamin D Receptor (VDR) | Human | J03258 | Vitamin D |
| NR1I2 | Pregnane X Receptor (PXR) | Human | AF061056 | Xenobiotics |
| | | | | (dexamethasone, |
| | | | | rifapicin) |
| NR1I3 | Constitutive Androstane Receptor alpha (CARα) | Human | Z30425 | Androstane |

NR2 Group

| | | | | |
|---|---|---|---|---|
| NR2A1 | Hepatocyte Nuclear Factor 4 alpha (HNF4α) | Human | X76930 | Fatty acids |
| NR2A3 | Hepatocyte Nuclear Factor 4 gamma (HNF4γ) | Human | Z49826 | Fatty acids |
| NR2B1 | Retinoid X Receptor alpha (RXRα) | Human | X52773 | Retinoids |
| NR2B2 | Retinoid X Receptor beta (RXRβ) | Human | M84820 | |
| NR2B3 | Retinoid X Receptor gamma (RXRγ) | Human | U38480 | |
| NR2C1 | Testicular Receptor 2 (TR2) | Human | M29960 | |
| NR2C2 | Testicular Receptor 4 (TR4) | Human | L27586 | |
| NR2E1 | Human homologue of the Drosophila tailless gene (TLX) | Human | Y13276 | |
| NR2E3 | Photoreceptor-specific Nuclear Receptor (PNR) | Human | AF121129 | |
| NR2F1 | Chicken ovalbumin upstream promoter- | Human | X12795 | |
| | transcription factor I (COUP-TFI) | | | |
| NR2F2 | Chicken ovalbumin upstream promoter- | Human | M64497 | |
| | transcription factor II (COUP-TFII) | | | |
| NR2F6 | V-erAA-Related Gene (EAR2) | Human | X12794 | |

NR3 Group

| | | | | |
|---|---|---|---|---|
| NR3A1 | Estrogen Receptor alpha (ERα) | Human | P03372 | Estrogen |
| NR3A2 | Estrogen Receptor beta (ERβ) | Human | AB006590 | |
| NR3B1 | Estrogen Receptor Related alpha (ERRα) | Human | X51416 | |
| NR3B2 | Estrogen Receptor Related beta (ERRβ) | Human | AF094517 | |
| NR3B3 | Estrogen Receptor Related gamma (ERRγ) | Human | AF058291 | |
| NR3C1 | Glucocorticoid Receptor (GR) | Human | X03225 | Cortisol |
| NR3C2 | Mineralocorticoid Receptor (MR) | Human | M16801 | Aldosterone |
| NR3C3 | Progesterone Receptor (PR) | Human | M15716 | Progesterone |
| NR3C4 | Androgen Receptor (AR) | Human | M20132 | Testosterone |

NR4 Group

| | | | |
|---|---|---|---|
| NR4A1 | Nerve Growth Factor IB alpha (NGFI-Bα) | Human | L13740 |
| NR4A2 | Nerve Growth Factor IB beta (NGFI-Bβ) | Human | X75918 |
| NR4A3 | Nerve Growth Factor IB gamma (NGFI-Bγ) | Human | D78579 |

NR5 Group

| | | | |
|---|---|---|---|
| NR5A1 | Steroidogenic Factor 1 (SF1) | Human | U76388 |
| NR5A2 | Liver Receptor Homolog-1 (LRH-1) | Human | U93553 |

NR6 Group

| | | | |
|---|---|---|---|
| NR6A1 | Germ Cell Nuclear Factor (GCNF) | Human | U64876 |

NR0B Subgroup (have only LBD, no DBD)

| | | | |
|---|---|---|---|
| NR0B1 | DAX1 | Human | S74720 |
| NR0B2 | Short Heterodimer Partner (SHP) | Human | L76571 |

Table data is taken from Laudet and Gronemeyer “The Nuclear Receptor Facts Book,” Academic Press. Class ID refers to a classification code for each member, and accession refers to the NCBI GenBank nucleotide accession code.

### Activity of the GR Ligand (Y)

[0122] In some embodiments, Y exhibits an EC₅₀ for GR activation (or in the case of an antagonist, an IC₅₀) of about 10 mM or less, or 1 mM (1000 μM) or less (e.g., about 750 μM or less, about 500 μM or less, about 250 μM or less, about 100 μM or less, about 75 μM or less, about 50 μM or less, about 25 μM or less, about 10 μM or less, about 7.5 μM or less, about 6 μM or less, about 5 μM or less, about 4 μM or less, about 3 μM or less, about 2 μM or less or about 1 μM or less). In some embodiments, Y exhibits an EC₅₀ or IC₅₀ at a glucocorticoid receptor of about 1000 nM or less (e.g., about 750 nM or less, about 500 nM or less, about 250 nM or less, about 100 nM or less, about 75 nM or less, about 50 nM or less, about 25 nM or less, about 10 nM or less, about 7.5 nM or less, about 6 nM or less, about 5 nM or less, about 4 nM or less, about 3 nM or less, about 2 nM or less or about 1 nM or less). In some embodiments, Y has an EC₅₀ or IC₅₀ at a glucocorticoid receptor which is in the picomolar range. Accordingly, in some embodiments, Y exhibits an EC₅₀ or IC₅₀ at a glucocorticoid receptor of about 1000 pM or less (e.g., about 750 pM or less, about 500 pM or less, about 250 pM or less, about 100 pM or less, about 75 pM or less, about 50 pM or less, about 25 pM or less, about 10 pM or less, about 7.5 pM or less, about 6 pM or less, about 5 pM or less, about 4 pM or less, about 3 pM or less, about 2 pM or less or about 1 pM or less).

[0123] In some embodiments, Y exhibits an EC₅₀ or IC₅₀ at a glucocorticoid receptor that is about 0.001 pM or more, about 0.01 pM or more, or about 0.1 pM or more. Glucocorticoid receptor activation (glucocorticoid receptor activity) can be measured in vitro by any assay known in the art. For example, the activity at the glucocorticoid receptor can be measured by expressing the receptor in yeast cells also harboring a reporter gene (e.g., lacZ which encodes β-galactosidase) under the control of a hormone-responsive promoter. Thus, in the presence of a ligand that acts at the receptor, the reporter gene is expressed and the activity of the reporter gene product can be measured (e.g., by measuring the activity of β-galactosidase in breaking down a chromogenic substrate, such as chlorophenol red-β-D-galactopyranoside (CPRG), which is initially yellow, into a red product that can be measured by absorbance). See, e.g., Jungbauer and Beck, J. Chromatog. B, 77: 167-178 (2002); Routledge and Sumpter, J. Biol. Chem., 272: 3280-3288 (1997); Liu et al., J. Biol. Chem., 274: 26654-26660 (1999). Binding of the GR ligand to the glucocorticoid receptor can be determined using any binding assay known in the art such as, for example, fluorescence polarization or a radioactive assay. See, e.g., Ranamoorthy et al., 138(4): 1520-1527 (1997).

[0124] In some embodiments, Y exhibits about 0.001% or more, about 0.01% or more, about 0.1% or more, about 0.5% or more, about 1% or more, about 5% or more, about 10% or more, about 20% or more, about 30% or more, about 40% or more, about 50% or more, about 60% or more, about 75% or more, about 100% or more, about 125% or more, about 150% or more, about 175% or more, about 200% or more, about 250% or more, about 300% or more, about 350% or more, about 400% or more, about 450% or more, or about 500% or higher activity at the glucocorticoid receptor relative to the native glucocorticoid (glucocorticoid potency). In some embodiments, Y exhibits about 5000% or less or about 10,000% or less activity at the glucocorticoid receptor relative to native glucocorticoid. The activity of Y at a receptor relative to a native ligand of the receptor is calculated as the inverse ratio of EC₅₀s for Y versus the native ligand. In some embodiments, Y is the native ligand of the receptor.

### Structure of the GR Ligand (Y)

[0125] The GR ligand of the invention (Y) is partly or wholly non-peptidic and is hydrophobic or lipophilic. In some embodiments, the GR ligand has a molecular weight that is about 5000 daltons or less, or about 4000 daltons or less, or about 3000 daltons or less, or about 2000 daltons or less, or about 1750 daltons or less, or about 1500 daltons or less, or about 1250 daltons or less, or about 1000 daltons or less, or about 750 daltons or less, or about 500 daltons or less, or about 250 daltons or less. The structure of Y can be in accordance with any of the teachings disclosed herein.

[0126] In the embodiments described herein, Y is conjugated to L (e.g. when L is a linking group) or Q (e.g. when L is a bond) at any position of Y that is capable of reacting with Q or L. One skilled in the art could readily determine the position and means of conjugation in view of general knowledge and the disclosure provided herein.

[0127] In any of the embodiments described herein wherein Y comprises a tetracyclic skeleton having three 6-membered rings joined to one 5-membered ring or a variation thereof (e.g. a Y that acts at the vitamin D receptor), the carbon atoms of the skeleton are referred to by position number, as shown below:

[chemical structure]

For example, a modification having a ketone at position-6 refers to the following structure:

[chemical structure]

[0128] In all embodiments, Y acts at a glucocorticoid receptor (GR). In some embodiments, Y comprises any structure that permits or promotes agonist activity at the GR, while in other embodiments Y is an antagonist of GR. In exemplary embodiments, Y comprises a structure of Formula C:

[chemical structure]

wherein R², R³, R⁶, R⁷, R⁸, R⁹, and R¹⁰ are each independently moieties that permit or promote agonist or antagonist activity upon the binding of the compound of Formula C to the GR; and each dash represents an optional double bond. In some embodiments, Formula C further comprises one or more substituents at one or more of positions 1, 2, 4, 5, 6, 7, 8, 9, 11, 12, 14, and 15 (e.g. hydroxyl or ketone at position-11).

[0129] In some embodiments, Y comprises a structure of Formula C wherein

[0130] R² is hydrogen, (C₀-C₈ alkyl)halo, C₁-C₁₈ alkyl, C₂-C₁₈ alkenyl, C₂-C₁₈ alkynyl, heteroalkyl, (C₀-C₈ alkyl)aryl, (C₀-C₈ alkyl)heteroaryl, (C₀-C₈ alkyl)OC₁-C₁₈ alkyl, (C₀-C₈ alkyl)OC₂-C₁₈ alkenyl, (C₀-C₈ alkyl)OC₂-C₁₈ alkynyl, (C₀-C₈ alkyl)OH, (C₀-C₈ alkyl)SH, (C₀-C₈ alkyl)NR²⁴C₁-C₁₈ alkyl, (C₀-C₈ alkyl)NR²⁴C₂-C₁₈ alkenyl, (C₀-C₈ alkyl)NR²⁴C₂-C₁₈ alkynyl, (C₀-C₈alkyl)NR²⁴H₂, (C₀-C₈ alkyl)C(O)C₁-C₁₈ alkyl, (C₀-C₈ alkyl)C(O)C₂-C₁₈ alkenyl, (C₀-C₈ alkyl)C(O)C₂-C₁₈ alkynyl, (C₀-C₈ alkyl)C(O)H, (C₀-C₈ alkyl)C(O)aryl, (C₀-C₈ alkyl)C(O)heteroaryl, (C₀-C₈ alkyl)C(O)OC₁-C₁₈ alkyl, (C₀-C₈ alkyl)C(O)OC₂-C₁₈ alkenyl, (C₀-C₈ alkyl)C(O)OC₂-C₁₈ alkynyl, (C₀-C₈ alkyl)C(O)OH, (C₀-C₈ alkyl)C(O)O aryl, (C₀-C₈ alkyl)C(O)O heteroaryl, (C₀-C₈ alkyl)OC(O)C₁-C₁₈ alkyl, (C₀-C₈ alkyl)OC(O)C₂-C₁₈ alkenyl, (C₀-C₈ alkyl)OC(O)C₂-C₁₈ alkynyl, (C₀-C₈ alkyl)C(O)NR²⁴C₁-C₁₈ alkyl, (C₀-C₈ alkyl)C(O)NR²⁴C₂-C₁₈ alkenyl, (C₀-C₈ alkyl)C(O)NR²⁴C₂-C₁₈ alkynyl, (C₀-C₈ alkyl)C(O)NR²⁴H₂, (C₀-C₈ alkyl)C(O)NR²⁴aryl, (C₀-C₈ alkyl)C(O)NR²⁴heteroaryl, (C₀-C₈ alkyl)NR²⁴C(O)C₁-C₁₈ alkyl, (C₀-C₈ alkyl)NR²⁴C(O)C₂-C₈ alkenyl, or (C₀-C₈ alkyl)NR²⁴C(O)C₂-C₁₈ alkynyl, (C₀-C₈ alkyl)NR²⁴C(O)OH, (C₀-C₈ alkyl)OC(O)OC₁-C₁₈ alkyl, (C₀-C₈ alkyl)OC(O)OC₂-C₁₈ alkenyl, (C₀-C₈ alkyl)OC(O)OC₂-C₁₈ alkynyl, (C₀-C₈ alkyl)OC(O)OH, (C₀-C₈ alkyl)OC(O)NR²⁴C₁-C₁₈ alkyl, (C₀-C₈ alkyl)OC(O)NR²⁴C₂-C₁₈ alkenyl, (C₀-C₈ alkyl)OC(O)NR²⁴C₂-C₁₈ alkynyl, (C₀-C₈ alkyl)OC(O)NR²⁴H₂, (C₀-C₈ alkyl)NR²⁴(O)OC₁-C₁₈ alkyl, (C₀-C₈ alkyl)NR²⁴(O)OC₂-C₁₈ alkenyl, (C₀-C₈ alkyl)NR²⁴(O)OC₂-C₁₈ alkynyl, or (C₀-C₈ alkyl)NR²⁴(O)OH;

[0131] R³ is hydrogen, (C₀-C₈ alkyl)halo, C₁-C₁₈ alkyl, C₂-C₁₈ alkenyl, C₂-C₁₈ alkynyl, heteroalkyl, (C₀-C₈ alkyl)aryl, (C₀-C₈ alkyl)heteroaryl, (C₀-C₈ alkyl)OC₁-C₁₈ alkyl, (C₀-C₈ alkyl)OC₂-C₁₈ alkenyl, (C₀-C₈ alkyl)OC₂-C₁₈ alkynyl, (C₀-C₈ alkyl)OH, (C₀-C₈ alkyl)SH, (C₀-C₈ alkyl)NR²⁴C₁-C₁₈ alkyl, (C₀-C₈ alkyl)NR²⁴C₂-C₁₈ alkenyl, (C₀-C₈ alkyl)NR²⁴C₂-C₁₈ alkynyl, (C₀-C₈alkyl)NR²⁴H₂, (C₀-C₈ alkyl)C(O)C₁-C₁₈ alkyl, (C₀-C₈ alkyl)C(O)C₂-C₁₈ alkenyl, (C₀-C₈ alkyl)C(O)C₂-C₁₈ alkynyl, (C₀-C₈ alkyl)C(O)H, (C₀-C₈ alkyl)C(O)aryl, (C₀-C₈ alkyl)C(O)heteroaryl, (C₀-C₈ alkyl)C(O)OC₁-C₁₈ alkyl, (C₀-C₈ alkyl)C(O)OC₂-C₁₈ alkenyl, (C₀-C₈ alkyl)C(O)OC₂-C₁₈ alkynyl, (C₀-C₈ alkyl)C(O)OH, (C₀-C₈ alkyl)C(O)O aryl, (C₀-C₈ alkyl)C(O)O heteroaryl, (C₀-C₈ alkyl)OC(O)C₁-C₁₈ alkyl, (C₀-C₈ alkyl)OC(O)C₂-C₁₈ alkenyl, (C₀-C₈ alkyl)OC(O)C₂-C₁₈ alkynyl, (C₀-C₈ alkyl)C(O)NR²⁴C₁-C₁₈ alkyl, (C₀-C₈ alkyl)C(O)NR²⁴C₂-C₁₈ alkenyl, (C₀-C₈ alkyl)C(O)NR²⁴C₂-C₁₈ alkynyl, (C₀-C₈ alkyl)C(O)NR²⁴H₂, (C₀-C₈ alkyl)C(O)NR²⁴aryl, (C₀-C₈ alkyl)C(O)NR²⁴heteroaryl, (C₀-C₈ alkyl)NR²⁴C(O)C₁-C₁₈ alkyl, (C₀-C₈ alkyl)NR²⁴C(O)C₂-C₈ alkenyl, or (C₀-C₈ alkyl)NR²⁴C(O)C₂-C₁₈ alkynyl, (C₀-C₈ alkyl)NR²⁴C(O)OH, (C₀-C₈ alkyl)OC(O)OC₁-C₁₈ alkyl, (C₀-C₈ alkyl)OC(O)OC₂-C₁₈ alkenyl, (C₀-C₈ alkyl)OC(O)OC₂-C₁₈ alkynyl, (C₀-C₈ alkyl)OC(O)OH, (C₀-C₈ alkyl)OC(O)NR²⁴C₁-C₁₈ alkyl, (C₀-C₈ alkyl)OC(O)NR²⁴C₂-C₁₈ alkenyl, (C₀-C₈ alkyl)OC(O)NR²⁴C₂-C₁₈ alkynyl, (C₀-C₈ alkyl)OC(O)NR²⁴H₂, (C₀-C₈ alkyl)NR²⁴(O)OC₁-C₁₈ alkyl, (C₀-C₈ alkyl)NR²⁴(O)OC₂-C₁₈ alkenyl, (C₀-C₈ alkyl)NR²⁴(O)OC₂-C₁₈ alkynyl, or (C₀-C₈ alkyl)NR²⁴(O)OH;

[0132] R⁶ is hydrogen, C₁-C₁₈ alkyl, C₂-C₁₈ alkenyl, C₂-C₁₈ alkynyl, heteroalkyl, (C₀-C₈ alkyl)aryl, (C₀-C₈ alkyl)heteroaryl, (C₀-C₈ alkyl)C(O)C₁-C₁₈ alkyl, (C₀-C₈ alkyl)C(O)C₂-C₁₈ alkenyl, (C₀-C₈ alkyl)C(O)C₂-C₁₈ alkynyl, (C₀-C₈ alkyl)C(O)H, (C₀-C₈ alkyl)C(O)aryl, (C₀-C₈ alkyl)C(O)heteroaryl, (C₀-C₈ alkyl)C(O)OC₁-C₁₈ alkyl, (C₀-C₈ alkyl)C(O)OC₂-C₁₈ alkenyl, (C₀-C₈ alkyl)C(O)OC₂-C₁₈ alkynyl, (C₀-C₈ alkyl)C(O)OH, C₀-C₈ alkyl)C(O)O aryl, (C₀-C₈ alkyl)C(O)O heteroaryl, (C₀-C₈ alkyl)C(O)NR²⁴C₁-C₁₈ alkyl, (C₀-C₈ alkyl)C(O)NR²⁴C₂-C₁₈ alkenyl, (C₀-C₈ alkyl)C(O)NR²⁴C₂-C₁₈ alkynyl, (C₀-C₈ alkyl)C(O)NR²⁴H₂, (C₀-C₈ alkyl)C(O)NR²⁴aryl, or (C₀-C₈ alkyl)C(O)NR²⁴heteroaryl;

[0133] R⁷ is hydrogen, C₁-C₁₈ alkyl, C₂-C₁₈ alkenyl, C₂-C₁₈ alkynyl, heteroalkyl, (C₀-C₈ alkyl)aryl, (C₀-C₈ alkyl)heteroaryl, (C₀-C₈ alkyl)C(O)C₁-C₁₈ alkyl, (C₀-C₈ alkyl)C(O)C₂-C₁₈ alkenyl, (C₀-C₈ alkyl)C(O)C₂-C₁₈ alkynyl, (C₀-C₈ alkyl)C(O)H, (C₀-C₈ alkyl)C(O)aryl, (C₀-C₈ alkyl)C(O)heteroaryl, (C₀-C₈ alkyl)C(O)OC₁-C₁₈ alkyl, (C₀-C₈ alkyl)C(O)OC₂-C₁₈ alkenyl, (C₀-C₈ alkyl)C(O)OC₂-C₁₈ alkynyl, (C₀-C₈ alkyl)C(O)OH, C₀-C₈ alkyl)C(O)O aryl, (C₀-C₈ alkyl)C(O)O heteroaryl, (C₀-C₈ alkyl)C(O)NR²⁴C₁-C₁₈ alkyl, (C₀-C₈ alkyl)C(O)NR²⁴C₂-C₁₈ alkenyl, (C₀-C₈ alkyl)C(O)NR²⁴C₂-C₁₈ alkynyl, (C₀-C₈ alkyl)C(O)NR²⁴H₂, (C₀-C₈ alkyl)C(O)NR²⁴aryl, or (C₀-C₈ alkyl)C(O)NR²⁴heteroaryl;

[0134] R⁸ is hydrogen, (C₀-C₈ alkyl)halo, C₁-C₁₈ alkyl, C₂-C₁₈ alkenyl, C₂-C₁₈ alkynyl, heteroalkyl, (C₀-C₈ alkyl)aryl, (C₀-C₈ alkyl)heteroaryl;

[0135] R⁹ is hydrogen, (C₀-C₈ alkyl)halo, C₁-C₁₈ alkyl, C₂-C₁₈ alkenyl, C₂-C₁₈ alkynyl, heteroalkyl, (C₀-C₈ alkyl)aryl, (C₀-C₈ alkyl)heteroaryl;

[0136] R¹⁰ is hydrogen, (C₀-C₈ alkyl)halo, C₁-C₁₈ alkyl, or (C₀-C₈ alkyl)OH; and

[0137] R²⁴ is hydrogen or C₁-C₁₈ alkyl.

[0138] In some embodiments, Y comprises a structure of Formula C, wherein

[0139] R² is hydrogen, halo, OH, or C₁-C₇ alkyl;

[0140] R³ is hydrogen, halo, OH, or C₁-C₇ alkyl;

[0141] R⁶ is hydrogen, C₁-C₈ alkyl, C₂-C₈ alkenyl, C₂-C₈ alkynyl, heteroalkyl, (C₀-C₈ alkyl)aryl, (C₀-C₈ alkyl)heteroaryl, (C₀-C₈ alkyl)C(O)C₁-C₈ alkyl, (C₀-C₈ alkyl)C(O)C₂-C₈ alkenyl, (C₀-C₈ alkyl)C(O)C₂-C₈ alkynyl, (C₀-C₈ alkyl)C(O)H, (C₀-C₈ alkyl)C(O)aryl, (C₀-C₈ alkyl)C(O)heteroaryl, (C₀-C₈ alkyl)C(O)OC₁-C₈ alkyl, (C₀-C₈ alkyl)C(O)OC₂-C₈ alkenyl, (C₀-C₈ alkyl)C(O)OC₂-C₈ alkynyl, (C₀-C₈ alkyl)C(O)OH, C₀-C₈ alkyl)C(O)O aryl, (C₀-C₈ alkyl)C(O)O heteroaryl, (C₀-C₈ alkyl)C(O)NR²⁴C₁-C₈ alkyl, (C₀-C₈ alkyl)C(O)NR²⁴C₂-C₈ alkenyl, (C₀-C₈ alkyl)C(O)NR²⁴C₂-C₈ alkynyl, (C₀-C₈ alkyl)C(O)NR²⁴H₂, (C₀-C₈ alkyl)C(O)NR²⁴aryl, or (C₀-C₈ alkyl)C(O)NR²⁴heteroaryl;

[0142] R⁷ is hydrogen, C₁-C₈ alkyl, C₂-C₈ alkenyl, C₂-C₈ alkynyl, heteroalkyl, (C₀-C₈ alkyl)aryl, (C₀-C₈ alkyl)heteroaryl, (C₀ alkyl)C(O)C₁-C₈ alkyl, (C₀ alkyl)C(O)C₂-C₈ alkenyl, (C₀ alkyl)C(O)C₂-C₈ alkynyl, (C₀)C(O)aryl, (C₀)C(O)heteroaryl, (C₀)C(O)OC₁-C₈ alkyl, (C₀ alkyl)C(O)OC₂-C₈ alkenyl, (C₀ alkyl)C(O)OC₂-C₈ alkynyl, or (C₀ alkyl)C(O)OH;

[0143] R⁸ is hydrogen or C₁-C₇ alkyl;

[0144] R⁹ is hydrogen or C₁-C₇ alkyl;

[0145] R¹⁰ is hydrogen or OH; and

[0146] R²⁴ is hydrogen or C₁-C₇ alkyl.

[0147] For example, R² is hydrogen or methyl; R³ is hydrogen, fluoro, chloro, or methyl; R⁶ is hydrogen or C(O)C₁-C₇ alkyl; R⁷ is hydrogen, C(O)CH₃, or C(O)CH₂CH₃; R⁸ is hydrogen or methyl; R⁹ is hydrogen or methyl; and R¹⁰ is hydroxyl.

[0148] Nonlimiting examples of structures of Formula C include:

[chemical structure]

[chemical structure]

[chemical structure]

and derivatives thereof.

[0149] In embodiments wherein Y comprises a structure of Formula C, Y is conjugated to L (e.g. when L is a linking group) or Q (e.g. when L is a bond) at any position of Formula C that is capable of reacting with Q or L. One skilled in the art could readily determine the position of conjugation on Formula C and means of conjugation of Formula C to Q or L in view of general knowledge and the disclosure provided herein. In some embodiments, Formula C is conjugated to L or Q at any of positions 1, 2, 3, 4, 5, 6, 7, 8, 9, 10, 11, 12, 13, 14, 15, 16, 17, 18, 19, 20, 21, 22, or 23 of Formula C. In some embodiments, Formula C is conjugated to L or Q at position 3, 10, 16 or 17 of Formula C. In preferred embodiments, Formula C is conjugated to L or Q at position 3 or 17 of Formula C.

### Modification of the GR Ligand (Y)

[0150] In some embodiments, the GR ligand is derivatized or otherwise chemically modified to comprise a reactive moiety that is capable of reacting with the glucagon superfamily peptide (Q) or the linking group (L). In the embodiments described herein, Y is derivatized at any position of Y that is capable of reacting with Q or L. The position of derivatization on Y is apparent to one skilled in the art and depends on the type of GR ligand used and the activity that is desired. For example, in embodiments wherein Y has a structure comprising a tetracyclic skeleton having three 6-membered rings joined to one 5-membered ring or a variation thereof, Y can be derivatized at any of positions 1, 2, 3, 4, 5, 6, 7, 8, 9, 10, 11, 12, 13, 14, 15, 16, 17, 18, 19, 20, 21, 22, 23, 24, or 25. Other positions of derivatization can be as previously described herein.

[0151] The GR ligand can be derivatized using any agent known to one skilled in the art or described herein (e.g. see The Linking Group section and the Chemical Modification of Q and/or Y subsection). For example, estradiol can be derivatized with succinic acid, succinic anhydride, benzoic acid, ethyl 2-bromoacetate, or iodoacetic acid to form the below derivatives of estradiol that are capable of conjugating to Q or L.

[chemical structure]

[0152] Similarly, any of the aforementioned GR ligands can be derivatized by methods known in the art. Additionally, certain derivatized ligands are commercially available and can be purchased from chemical companies such as Sigma-Aldrich.

### The Glucagon Superfamily Peptide (Q)

[0153] In the Q-L-Y conjugates described herein, Q is a glucagon superfamily peptide. A glucagon superfamily peptide refers to a group of peptides related in structure in their N-terminal and/or C-terminal regions (see, for example, Sherwood et al., Endocrine Reviews 21: 619-670 (2000)). It is believed that the C-terminus generally functions in receptor binding and the N-terminus generally functions in receptor signaling. A few amino acids in the N-terminal and C-terminal regions are highly conserved among members of the glucagon superfamily. Some of these conserved amino acids include His1, Gly4, Phe6, Phe22, Val23, Trp25 and Leu26, with amino acids at these positions showing identity, conservative substitutions or similarity in the structure of their amino acid side chains.

[0154] Glucagon superfamily peptides include glucagon related peptides, Growth Hormone Releasing Hormone (GHRH; SEQ ID NO: 1619), vasoactive intestinal peptide (VIP; SEQ ID NO: 1620), pituitary adenylate cyclase-activating polypeptide 27 (PACAP-27; SEQ ID NO: 1621), peptide histidine isoleucine (PHI; SEQ ID NO: 1542), peptide histidine methionine (PHM; SEQ ID NO: 1622), secretin (SEQ ID NO: 1623), and/or analogs, derivatives or conjugates thereof. In some embodiments, Q comprises an amino acid sequence of native glucagon, native exendin-4, native GLP-1(7-37), native GLP-2, native GHRH, native VIP, native PACAP-27, native PHM, native oxyntomodulin, native secretin, or native GIP with up to 1, 2, 3, 4, 5, 6, 7, 8, 9 or 10 amino acid modifications.

[0155] In some aspects of this invention, Q is a glucagon related peptide such as, for example, glucagon (SEQ ID NO: 1601), oxyntomodulin (SEQ ID NO: 1606), exendin-4 (SEQ ID NO: 1618), glucagon-like peptide-1 (GLP-1) (amino acids 7-36 provided as SEQ ID NO: 1603; amino acids 7-37 are provided as SEQ ID NO: 1604), glucagon-like peptide-2 (GLP-2, SEQ ID NO: 1608), gastric inhibitory peptide (GIP, SEQ ID NO: 1607) or analogs, derivatives and conjugates thereof. A glucagon related peptide has biological activity (as an agonist or antagonist) at any one or more of the glucagon, GLP-1, GLP-2, and GIP receptors and comprise an amino acid sequence that shares at least 20% sequence identity (e.g., 25%, 30%, 35%, 40%, 45%, 50%, 55%, 60%, 65%, 70%, 75%, 80%, 85%, 90%, 95%) with at least one of native glucagon, native oxyntomodulin, native exendin-4, native GLP-1(7-37), native GLP-2, or native GIP over the length of the peptide (or over the positions which correspond to glucagon, see e.g. FIG. 1).

[0156] It is understood that all possible activity subsets of glucagon related peptides are contemplated, e.g. peptides which have biological activity (as agonists or antagonists) at any one or more of the glucagon or GLP-1 or GIP receptors, together with all possible subsets of sequence identity to each listed native peptide, e.g., comprise an amino acid sequence that shares at least 20%, 25%, 30%, 35%, 40%, 45%, 50%, 55%, 60%, 65%, 70%, 75%, 80%, 85%, 90%, or 95% sequence identity with native GLP-1 over the length of native GLP-1. In some embodiments of the invention, the glucagon related peptide is a peptide having glucagon receptor agonist activity, GLP-1 receptor agonist activity, GIP receptor agonist activity, glucagon receptor/GLP-1 receptor co-agonist activity, glucagon receptor/GIP receptor co-agonist activity, GLP-1 receptor/GIP receptor co-agonist activity, glucagon receptor/GLP-1 receptor/GIP receptor tri-agonist activity, glucagon receptor antagonist activity, or glucagon receptor antagonist/GLP-1 receptor agonist activity. In some embodiments, the peptide retains an alpha-helix conformation in the C-terminal half of the molecule. In some embodiments, the peptide retains positions involved in receptor interaction or signaling, e.g. position 3 of glucagon, or position 7, 10, 12, 13, 15 or 17 of GLP-1(7-37). Accordingly, the glucagon related peptide can be a peptide of Class 1, Class 2, Class 3, Class 4, and/or Class 5, each of which is further described herein.

[0157] Q may also be any of the glucagon superfamily peptides that are known in the art, some of which are disclosed herein by way of nonlimiting examples. A variety of GLP-1 analogs are known in the art and are a glucagon-related peptide according to the current invention, see, e.g., WO 2008023050, WO 2007030519, WO 2005058954, WO 2003011892, WO 2007046834, WO 2006134340, WO 2006124529, WO 2004022004, WO 2003018516, WO 2007124461 each incorporated herein by reference in its entirety for each of its sequence or formula disclosures of GLP-1 analogs or derivatives. In any of the embodiments, Q can be a glucagon related peptide disclosed in WO 2007/056362, WO 2008/086086, WO 2009/155527, WO 2008/101017, WO 2009/155258, WO 2009/058662, WO 2009/058734, WO 2009/099763, WO 2010/011439, PCT Patent Application No. U.S. 09/68745, and U.S. Patent Application No. 61/187,578 each incorporated herein by reference in its entirety. In certain embodiments, Q is a Class 1, Class 2, Class 3, Class 4, or Class 5 glucagon related peptide as detailed herein. In any of the embodiments described herein, Q is any of SEQ ID NOs: 1-760, 801-919, 1001-1275, 1301-1371, 1401-1518, 1601-1650. In some embodiments, Q is any of SEQ ID NOs: 1647-1650.

### Activity of the Glucagon Superfamily Peptide (Q)

### Activity at the Glucagon Receptor

[0158] In some embodiments, Q exhibits an EC₅₀ for glucagon receptor activation (or an IC₅₀ for glucagon receptor antagonism) of about 10 mM or less, or about 1 mM (1000 μM) or less (e.g., about 750 μM or less, about 500 μM or less, about 250 μM or less, about 100 μM or less, about 75 μM or less, about 50 μM or less, about 25 μM or less, about 10 μM or less, about 7.5 μM or less, about 6 μM or less, about 5 μM or less, about 4 μM or less, about 3 μM or less, about 2 μM or less or about 1 μM or less). In some embodiments, Q exhibits an EC₅₀ or IC₅₀ at the glucagon receptor of about 1000 nM or less (e.g., about 750 nM or less, about 500 nM or less, about 250 nM or less, about 100 nM or less, about 75 nM or less, about 50 nM or less, about 25 nM or less, about 10 nM or less, about 7.5 nM or less, about 6 nM or less, about 5 nM or less, about 4 nM or less, about 3 nM or less, about 2 nM or less or about 1 nM or less). In some embodiments, Q has an EC₅₀ or IC₅₀ at the glucagon receptor which is in the picomolar range. Accordingly, in some embodiments, Q exhibits an EC₅₀ or IC₅₀ at the glucagon receptor of about 1000 pM or less (e.g., about 750 pM or less, about 500 pM or less, about 250 pM or less, about 100 pM or less, about 75 pM or less, about 50 pM or less, about 25 pM or less, about 10 pM or less, about 7.5 pM or less, about 6 pM or less, about 5 pM or less, about 4 pM or less, about 3 pM or less, about 2 pM or less or about 1 pM or less).

[0159] In some embodiments, Q exhibits an EC₅₀ or IC₅₀ at the glucagon receptor that is about 0.001 pM or more, about 0.01 pM or more, or about 0.1 pM or more. Glucagon receptor activation (glucagon receptor activity) can be measured by in vitro assays measuring cAMP induction in HEK293 cells over-expressing the glucagon receptor, e.g., assaying HEK293 cells co-transfected with DNA encoding the glucagon receptor and a luciferase gene linked to cAMP responsive element as described in Example 2.

[0160] In some embodiments, Q exhibits about 0.001% or more, about 0.01% or more, about 0.1% or more, about 0.5% or more, about 1% or more, about 5% or more, about 10% or more, about 20% or more, about 30% or more, about 40% or more, about 50% or more, about 60% or more, about 75% or more, about 100% or more, about 125% or more, about 150% or more, about 175% or more, about 200% or more, about 250% or more, about 300% or more, about 350% or more, about 400% or more, about 450% or more, or about 500% or higher activity at the glucagon receptor relative to native glucagon (glucagon potency). In some embodiments, Q exhibits about 5000% or less or about 10,000% or less activity at the glucagon receptor relative to native glucagon. The activity of Q at a receptor relative to a native ligand of the receptor is calculated as the inverse ratio of EC₅₀s for Q versus the native ligand.

[0161] In some embodiments, Q exhibits substantial activity (potency) at only the glucagon receptor and little to no activity at the GLP-1 receptor or the GIP receptor. In some embodiments, Q is considered as a “pure glucagon receptor agonist” or is not considered as a “glucagon/GLP-1 receptor co-agonist” or a “glucagon/GIP receptor co-agonist.” In some embodiments Q exhibits any of the levels of activity or potency at the glucagon receptor described herein but has substantially less activity (potency) at the GLP-1 receptor or the GIP receptor. In some embodiments, Q exhibits an EC₅₀ at the GLP-1 receptor which is 100-fold or greater than the EC₅₀ at the glucagon receptor. In some embodiments, Q exhibits an EC₅₀ at the GIP receptor which is 100-fold or greater than the EC₅₀ at the glucagon receptor.

### Activity at the GLP-1 Receptor

[0162] In some embodiments, Q exhibits an EC₅₀ for GLP-1 receptor activation (or an IC₅₀ for GLP-1 receptor antagonism) of about 10 mM or less, or about 1 mM (1000 μM) or less (e.g., about 750 μM or less, about 500 μM or less, about 250 μM or less, about 100 μM or less, about 75 μM or less, about 50 μM or less, about 25 μM or less, about 10 μM or less, about 7.5 μM or less, about 6 μM or less, about 5 μM or less, about 4 μM or less, about 3 μM or less, about 2 μM or less or about 1 μM or less). In some embodiments, Q exhibits an EC₅₀ or IC₅₀ for GLP-1 receptor activation of about 1000 nM or less (e.g., about 750 nM or less, about 500 nM or less, about 250 nM or less, about 100 nM or less, about 75 nM or less, about 50 nM or less, about 25 nM or less, about 10 nM or less, about 7.5 nM or less, about 6 nM or less, about 5 nM or less, about 4 nM or less, about 3 nM or less, about 2 nM or less or about 1 nM or less). In some embodiments, Q has an EC₅₀ or IC₅₀ at the GLP-1 receptor which is in the picomolar range. Accordingly, in some embodiments, Q exhibits an EC₅₀ or IC₅₀ for GLP-1 receptor activation of about 1000 pM or less (e.g., about 750 pM or less, about 500 pM or less, about 250 pM or less, about 100 pM or less, about 75 pM or less, about 50 pM or less, about 25 pM or less, about 10 pM or less, about 7.5 pM or less, about 6 pM or less, about 5 pM or less, about 4 pM or less, about 3 pM or less, about 2 pM or less or about 1 pM or less).

[0163] In some embodiments, Q exhibits an EC₅₀ or IC₅₀ at the GLP-1 receptor that is about 0.001 pM or more, about 0.01 pM or more, or about 0.1 pM or more. GLP-1 receptor activation (GLP-1 receptor activity) can be measured by in vitro assays measuring cAMP induction in HEK293 cells over-expressing the GLP-1 receptor, e.g., assaying HEK293 cells co-transfected with DNA encoding the GLP-1 receptor and a luciferase gene linked to cAMP responsive element as described in Example 2.

[0164] In some embodiments, Q exhibits about 0.001% or more, about 0.01% or more, about 0.1% or more, about 0.5% or more, about 1% or more, about 5% or more, about 10% or more, about 20% or more, about 30% or more, about 40% or more, about 50% or more, about 60% or more, about 75% or more, about 100% or more, about 125% or more, about 150% or more, about 175% or more, about 200% or more, about 250% or more, about 300% or more, about 350% or more, about 400% or more, about 450% or more, or about 500% or higher activity at the GLP-1 receptor relative to native GLP-1 (GLP-1 potency). In some embodiments, Q exhibits about 5000% or less or about 10,000% or less activity at the GLP-1 receptor relative to native GLP-1 (GLP-1 potency).

[0165] In some embodiments, Q exhibit substantial activity (potency) at only the GLP-1 receptor and little to no activity at the glucagon receptor or the GIP receptor. In some embodiments, Q is considered as a “pure GLP-1 receptor agonist” or is not considered as a “glucagon/GLP-1 receptor co-agonist” or a “GLP-1/GIP co-agonist.” In some embodiments Q exhibits any of the levels of activity or potency at the GLP-1 receptor described herein but have substantially less activity (potency) at the glucagon receptor or the GIP receptor. In some embodiments, Q exhibits an EC₅₀ at the glucagon receptor which is 100-fold or greater than the EC₅₀ at the GLP-1 receptor. In some embodiments, Q exhibits an EC₅₀ at the GIP receptor which is 100-fold or greater than the EC₅₀ at the GLP-1 receptor.

### Activity at the GIP Receptor

[0166] In some embodiments, Q exhibits an EC₅₀ for GIP receptor activation (or an IC₅₀ for GIP receptor antagonism) of about 10 mM or less, or about 1 mM (1000 μM) or less (e.g., about 750 μM or less, about 500 μM or less, about 250 μM or less, about 100 μM or less, about 75 μM or less, about 50 μM or less, about 25 μM or less, about 10 μM or less, about 7.5 μM or less, about 6 μM or less, about 5 μM or less, about 4 μM or less, about 3 μM or less, about 2 μM or less or about 1 μM or less). In some embodiments, the EC₅₀ or IC₅₀ of Q at the GIP receptor is less than 1000 nM, less than 900 nM, less than 800 nM, less than 700 nM, less than 600 nM, less than 500 nM, less than 400 nM, less than 300 nM, or less than 200 nM. In some embodiments, the EC₅₀ or IC₅₀ of Q at the GIP receptor is about 100 nM or less, e.g., about 75 nM or less, about 50 nM or less, about 25 nM or less, about 10 nM or less, about 8 nM or less, about 6 nM or less, about 5 nM or less, about 4 nM or less, about 3 nM or less, about 2 nM or less, or about 1 nM or less. In some embodiments, the Q exhibits an EC₅₀ or IC₅₀ for GIP receptor activation which is in the picomolar range. In exemplary embodiments, the EC₅₀ or IC₅₀ of Q at the GIP receptor is less than 1000 pM, less than 900 pM, less than 800 pM, less than 700 pM, less than 600 pM, less than 500 pM, less than 400 pM, less than 300 pM, less than 200 pM. In some embodiments, the EC₅₀ or IC₅₀ of Q at the GIP receptor is about 100 pM or less, e.g., about 75 pM or less, about 50 pM or less, about 25 pM or less, about 10 pM or less, about 8 pM or less, about 6 pM or less, about 5 pM or less, about 4 pM or less, about 3 pM or less, about 2 pM or less, or about 1 pM or less. Receptor activation can be measured by in vitro assays measuring cAMP induction in HEK293 cells over-expressing the GIP receptor, e.g. assaying HEK293 cells co-transfected with DNA encoding the receptor and a luciferase gene linked to cAMP responsive element as described in Example 2.

[0167] In some embodiments of the present disclosures, Q exhibits at least or about 0.1% activity of native GIP at the GIP receptor. In exemplary embodiments, Q exhibits at least or about 0.2%, at least or about 0.3%, at least or about 0.4%, at least or about 0.5%, at least or about 0.6%, at least or about 0.7%, at least or about 0.8%, at least or about 0.9%, at least or about 1%, at least or about 5%, at least or about 10%, at least or about 20%, at least or about 30%, at least or about 40%, at least or about 50%, at least or about 60%, at least or about 70%, at least or about 75%, at least or about 80%, at least or about 90%, at least or about 95%, or at least or about 100% of the activity of native GIP at the GIP receptor.

[0168] In some embodiments of the present disclosures, Q exhibits activity at the GIP receptor which is greater than that of native GIP. In exemplary embodiments, Q exhibits at least or about 101%, at least or about 105%, at least or about 110%, at least or about 125%, at least or about 150%, at least or about 175% at least or about 200%, at least or about 300%, at least or about 400%, at least or about 500% or higher % of the activity of native GIP at the GIP receptor. In some embodiments, Q exhibits no more than 1000%, 10,000%, 100,000%, or 1,000,000% activity at the GIP receptor relative to native GIP. A peptide's activity at the GIP receptor relative to native GIP is calculated as the inverse ratio of EC50s for the GIP agonist peptide vs. native GIP.

[0169] In some embodiments, Q exhibits substantial activity (potency) at only the GIP receptor and little to no activity at the glucagon receptor or the GLP-1 receptor. In some embodiments, Q is considered as a “pure GIP receptor agonist” or is not considered as a “glucagon/GIP receptor co-agonist” or a “GLP-1/GIP co-agonist.” In some embodiments Q exhibits any of the levels of activity or potency at the GIP receptor described herein but has substantially less activity (potency) at the glucagon receptor or the GLP-1 receptor. In some embodiments, Q exhibits an EC₅₀ at the glucagon receptor which is 100-fold or greater than the EC₅₀ at the GIP receptor and an EC₅₀ at the GLP-1 receptor which is 100-fold or greater than the EC₅₀ at the GIP receptor.

### Activity at the GLP-1 Receptor and the Glucagon Receptor

[0170] In some embodiments, Q exhibits activity at both the GLP-1 receptor and glucagon receptor (“glucagon/GLP-1 receptor co-agonists”). In some embodiments, the activity (e.g., the EC₅₀ or the relative activity or potency) of Q at the glucagon receptor is within about 50-fold, about 40-fold, about 30-fold, about 20-fold, about 10-fold, or about 5 fold different (higher or lower) from its activity (e.g., the EC₅₀ or the relative activity or potency) at the GLP-1 receptor. In some embodiments, the glucagon potency of Q is within about 25-, about 20-, about 15-, about 10-, or about 5-fold different (higher or lower) from its GLP-1 potency.

[0171] In some embodiments, the ratio of the relative activity or the EC₅₀ or the potency of the Q at the glucagon receptor divided by the relative activity or the EC₅₀ or potency of Q at the GLP-1 receptor is less than, or is about, X, wherein X is selected from 100, 75, 60, 50, 40, 30, 20, 15, 10, or 5. In some embodiments, the ratio of the EC₅₀ or potency or relative activity of Q at the glucagon receptor divided by the EC₅₀ or potency or relative activity of Q at the GLP-1 receptor is about 1 less than 5 (e.g., about 4, about 3, about 2, about 1). In some embodiments, the ratio of the glucagon potency of Q compared to the GLP-1 potency of Q is less than, or is about, Z, wherein Z is selected from 100, 75, 60, 50, 40, 30, 20, 15, 10, and 5. In some embodiments, the ratio of the glucagon potency of Q compared to the GLP-1 potency of Q is less than 5 (e.g., about 4, about 3, about 2, about 1). In some embodiments, Q has an EC₅₀ at the glucagon receptor which is 2- to 10-fold (e.g., 2-fold, 3-fold, 4-fold, 5-fold, 6-fold, 7-fold, 8-fold, 9-fold, 10-fold) greater than the EC₅₀ at the GLP-1 receptor.

[0172] In some embodiments, the ratio of the relative activity or potency or the EC₅₀ of Q at the GLP-1 receptor divided by the relative activity or potency or the EC₅₀ of the glucagon analog at the glucagon receptor is less than, or is about, V, wherein V is selected from 100, 75, 60, 50, 40, 30, 20, 15, 10, or 5. In some embodiments, the ratio of the EC₅₀ or potency or relative activity of Q at the GLP-1 receptor divided by the EC₅₀ or potency or relative activity of Q at the glucagon receptor is less than 5 (e.g., about 4, about 3, about 2, about 1). In some embodiments, the ratio of the GLP-1 potency of Q compared to the glucagon potency of Q is less than, or is about, W, wherein W is selected from 100, 75, 60, 50, 40, 30, 20, 15, 10, and 5. In some embodiments, the ratio of the GLP-1 potency of Q compared to the glucagon potency of Q is less than 5 (e.g., about 4, about 3, about 2, about 1). In some embodiments, Q has an EC₅₀ at the GLP-1 receptor which is about 2- to about 10-fold (e.g., 2-fold, 3-fold, 4-fold, 5-fold, 6-fold, 7-fold, 8-fold, 9-fold, 10-fold) greater than the EC₅₀ at the glucagon receptor.

[0173] In some embodiments, Q exhibits at least 0.1% (e.g., about 0.5% or more, about 1% or more, about 5% or more, about 10% or more, or more) of the activity of native GLP-1 at the GLP-1 receptor (GLP-1 potency) and exhibits at least 0.1% (e.g., about 0.5% or more, about 1% or more, about 5% or more, about 10% or more, or more) of the activity of native glucagon at the glucagon receptor (glucagon potency).

[0174] Selectivity of Q for the glucagon receptor versus the GLP-1 receptor can be described as the relative ratio of glucagon/GLP-1 activity (Q's activity at the glucagon receptor relative to native glucagon, divided by the analog's activity at the GLP-1 receptor relative to native GLP-1). For example, a Q that exhibits 60% of the activity of native glucagon at the glucagon receptor and 60% of the activity of native GLP-1 at the GLP-1 receptor has a 1:1 ratio of glucagon/GLP-1 activity. Exemplary ratios of glucagon/GLP-1 activity include about 1:1, 1.5:1, 2:1, 3:1, 4:1, 5:1, 6:1, 7:1, 8:1, 9:1 or 10:1, or about 1:10, 1:9, 1:8, 1:7, 1:6, 1:5, 1:4, 1:3, 1:2, or 1:1.5. As an example, a glucagon/GLP-1 activity ratio of 10:1 indicates a 10-fold selectivity for the glucagon receptor versus the GLP-1 receptor. Similarly, a GLP-1/glucagon activity ratio of 10:1 indicates a 10-fold selectivity for the GLP-1 receptor versus the glucagon receptor.

[0175] In some embodiments, Q exhibits substantial activity (potency) at the glucagon receptor and GLP-1 receptor and little to no activity at the GIP receptor. In some embodiments Q exhibits any of the levels of activity or potency at the glucagon receptor and the GLP-1 receptor described herein but has substantially less activity (potency) at the GIP receptor. In some embodiments, Q exhibits an EC₅₀ at the GIP receptor which is 100-fold or greater than the EC₅₀ at the glucagon receptor and the EC₅₀ at the GLP-1 receptor.

### Activity at the GLP-1 Receptor and the GIP Receptor

[0176] In some embodiments, Q exhibits activity at both the GLP-1 receptor and GIP receptor (“GIP/GLP-1 receptor co-agonists”). In some embodiments, the activity (e.g., the EC₅₀ or the relative activity or potency) of Q at the GIP receptor is within about 50-fold, about 40-fold, about 30-fold, about 20-fold, about 10-fold, or about 5 fold different (higher or lower) from its activity (e.g., the EC₅₀ or the relative activity or potency) at the GLP-1 receptor. In some embodiments, the GIP potency of Q is within about 25-, about 20-, about 15-, about 10-, or about 5-fold different (higher or lower) from its GLP-1 potency.

[0177] In some embodiments, the ratio of the relative activity or the EC₅₀ or the potency of the Q at the GIP receptor divided by the relative activity or the EC₅₀ or potency of Q at the GLP-1 receptor is less than, or is about, X, wherein X is selected from 100, 75, 60, 50, 40, 30, 20, 15, 10, or 5. In some embodiments, the ratio of the EC₅₀ or potency or relative activity of Q at the GIP receptor divided by the EC₅₀ or potency or relative activity of Q at the GLP-1 receptor is about 1 less than 5 (e.g., about 4, about 3, about 2, about 1). In some embodiments, the ratio of the GIP potency of Q compared to the GLP-1 potency of Q is less than, or is about, Z, wherein Z is selected from 100, 75, 60, 50, 40, 30, 20, 15, 10, and 5. In some embodiments, the ratio of the GIP potency of Q compared to the GLP-1 potency of Q is less than 5 (e.g., about 4, about 3, about 2, about 1). In some embodiments, Q has an EC₅₀ at the GIP receptor which is 2- to 10-fold (e.g., 2-fold, 3-fold, 4-fold, 5-fold, 6-fold, 7-fold, 8-fold, 9-fold, 10-fold) greater than the EC₅₀ at the GLP-1 receptor.

[0178] In some embodiments, the ratio of the relative activity or potency or the EC₅₀ of Q at the GLP-1 receptor divided by the relative activity or potency or the EC₅₀ of Q at the GIP receptor is less than, or is about, V, wherein V is selected from 100, 75, 60, 50, 40, 30, 20, 15, 10, or 5. In some embodiments, the ratio of the EC₅₀ or potency or relative activity of Q at the GLP-1 receptor divided by the EC₅₀ or potency or relative activity of Q at the GIP receptor is less than 5 (e.g., about 4, about 3, about 2, about 1). In some embodiments, the ratio of the GLP-1 potency of Q compared to the GIP potency of Q is less than, or is about, W, wherein W is selected from 100, 75, 60, 50, 40, 30, 20, 15, 10, and 5. In some embodiments, the ratio of the GLP-1 potency of Q compared to the GIP potency of Q is less than 5 (e.g., about 4, about 3, about 2, about 1). In some embodiments, Q has an EC₅₀ at the GLP-1 receptor which is about 2- to about 10-fold (e.g., 2-fold, 3-fold, 4-fold, 5-fold, 6-fold, 7-fold, 8-fold, 9-fold, 10-fold) greater than the EC₅₀ at the GIP receptor.

[0179] In some embodiments, Q exhibits at least 0.1% (e.g., about 0.5% or more, about 1% or more, about 5% or more, about 10% or more, or more) of the activity of native GLP-1 at the GLP-1 receptor (GLP-1 potency) and exhibits at least 0.1% (e.g., about 0.5% or more, about 1% or more, about 5% or more, about 10% or more, or more) of the activity of native GIP at the GIP receptor (GIP potency).

[0180] Selectivity of Q for the GIP receptor versus the GLP-1 receptor can be described as the relative ratio of GIP/GLP-1 activity (Q's activity at the GIP receptor relative to native GIP, divided by the analog's activity at the GLP-1 receptor relative to native GLP-1). For example, a Q that exhibits 60% of the activity of native GIP at the GIP receptor and 60% of the activity of native GLP-1 at the GLP-1 receptor has a 1:1 ratio of GIP/GLP-1 activity. Exemplary ratios of GIP/GLP-1 activity include about 1:1, 1.5:1, 2:1, 3:1, 4:1, 5:1, 6:1, 7:1, 8:1, 9:1 or 10:1, or about 1:10, 1:9, 1:8, 1:7, 1:6, 1:5, 1:4, 1:3, 1:2, or 1:1.5. As an example, a GIP/GLP-1 activity ratio of 10:1 indicates a 10-fold selectivity for the GIP receptor versus the GLP-1 receptor. Similarly, a GLP-1/GIP activity ratio of 10:1 indicates a 10-fold selectivity for the GLP-1 receptor versus the GIP receptor.

### Activity at the Glucagon Receptor and the GIP Receptor

[0181] In some embodiments, Q exhibits activity at both the glucagon receptor and GIP receptor (“GIP/glucagon receptor co-agonists”). In some embodiments, the activity (e.g., the EC₅₀ or the relative activity or potency) of Q at the GIP receptor is within about 50-fold, about 40-fold, about 30-fold, about 20-fold, about 10-fold, or about 5 fold different (higher or lower) from its activity (e.g., the EC₅₀ or the relative activity or potency) at the glucagon receptor. In some embodiments, the GIP potency of Q is within about 25-, about 20-, about 15-, about 10-, or about 5-fold different (higher or lower) from its glucagon potency.

[0182] In some embodiments, the ratio of the relative activity or the EC₅₀ or the potency of the Q at the GIP receptor divided by the relative activity or the EC₅₀ or potency of Q at the glucagon receptor is less than, or is about, X, wherein X is selected from 100, 75, 60, 50, 40, 30, 20, 15, 10, or 5. In some embodiments, the ratio of the EC₅₀ or potency or relative activity of Q at the GIP receptor divided by the EC₅₀ or potency or relative activity of Q at the glucagon receptor is about 1 less than 5 (e.g., about 4, about 3, about 2, about 1). In some embodiments, the ratio of the GIP potency of Q compared to the glucagon potency of Q is less than, or is about, Z, wherein Z is selected from 100, 75, 60, 50, 40, 30, 20, 15, 10, and 5. In some embodiments, the ratio of the GIP potency of Q compared to the glucagon potency of Q is less than 5 (e.g., about 4, about 3, about 2, about 1). In some embodiments, Q has an EC₅₀ at the GIP receptor which is 2- to 10-fold (e.g., 2-fold, 3-fold, 4-fold, 5-fold, 6-fold, 7-fold, 8-fold, 9-fold, 10-fold) greater than the EC₅₀ at the glucagon receptor.

[0183] In some embodiments, the ratio of the relative activity or potency or the EC₅₀ of Q at the glucagon receptor divided by the relative activity or potency or the EC₅₀ of Q at the GIP receptor is less than, or is about, V, wherein V is selected from 100, 75, 60, 50, 40, 30, 20, 15, 10, or 5. In some embodiments, the ratio of the EC₅₀ or potency or relative activity of Q at the glucagon receptor divided by the EC₅₀ or potency or relative activity of Q at the GIP receptor is less than 5 (e.g., about 4, about 3, about 2, about 1). In some embodiments, the ratio of the glucagon potency of Q compared to the GIP potency of Q is less than, or is about, W, wherein W is selected from 100, 75, 60, 50, 40, 30, 20, 15, 10, and 5. In some embodiments, the ratio of the glucagon potency of Q compared to the GIP potency of Q is less than 5 (e.g., about 4, about 3, about 2, about 1). In some embodiments, Q has an EC₅₀ at the glucagon receptor which is about 2- to about 10-fold (e.g., 2-fold, 3-fold, 4-fold, 5-fold, 6-fold, 7-fold, 8-fold, 9-fold, 10-fold) greater than the EC₅₀ at the GIP receptor.

[0184] In some embodiments, Q exhibits at least 0.1% (e.g., about 0.5% or more, about 1% or more, about 5% or more, about 10% or more, or more) of the activity of native glucagon at the glucagon receptor (glucagon potency) and exhibits at least 0.1% (e.g., about 0.5% or more, about 1% or more, about 5% or more, about 10% or more, or more) of the activity of native GIP at the GIP receptor (GIP potency).

[0185] Selectivity of Q for the GIP receptor versus the glucagon receptor can be described as the relative ratio of GIP/glucagon activity (Q's activity at the GIP receptor relative to native GIP, divided by the analog's activity at the glucagon receptor relative to native glucagon). For example, a Q that exhibits 60% of the activity of native GIP at the GIP receptor and 60% of the activity of native glucagon at the glucagon receptor has a 1:1 ratio of GIP/glucagon activity. Exemplary ratios of GIP/glucagon activity include about 1:1, 1.5:1, 2:1, 3:1, 4:1, 5:1, 6:1, 7:1, 8:1, 9:1 or 10:1, or about 1:10, 1:9, 1:8, 1:7, 1:6, 1:5, 1:4, 1:3, 1:2, or 1:1.5. As an example, a GIP/glucagon activity ratio of 10:1 indicates a 10-fold selectivity for the GIP receptor versus the glucagon receptor. Similarly, a glucagon/GIP activity ratio of 10:1 indicates a 10-fold selectivity for the glucagon receptor versus the GIP receptor.

### Activity at the Glucagon Receptor, the GLP-1 Receptor, and the GIP Receptor

[0186] In some embodiments, Q exhibits activity at all three of the glucagon receptor, the GLP-1 receptor, and the GIP receptor (“glucagon/GLP-1/GIP receptor tri-agonists”). In some embodiments, the activity (e.g., the EC₅₀ or the relative activity or potency) of Q at the glucagon receptor is within about 100-fold, about 75-fold, about 60-fold, 50-fold, about 40-fold, about 30-fold, about 20-fold, about 10-fold, or about 5 fold different (higher or lower) from its activity (e.g., the EC₅₀ or the relative activity or potency) at both the GLP-1 receptor and the GIP receptor. In some embodiments, the activity (e.g., the EC₅₀ or the relative activity or potency) of Q at the GLP-1 receptor is within about 100-fold, about 75-fold, about 60-fold, 50-fold, about 40-fold, about 30-fold, about 20-fold, about 10-fold, or about 5 fold different (higher or lower) from its activity (e.g., the EC₅₀ or the relative activity or potency) at both the glucagon receptor and the GIP receptor. In some embodiments, the activity (e.g., the EC₅₀ or the relative activity or potency) of Q at the GIP receptor is within about 100-fold, about 75-fold, about 60-fold, 50-fold, about 40-fold, about 30-fold, about 20-fold, about 10-fold, or about 5 fold different (higher or lower) from its activity (e.g., the EC₅₀ or the relative activity or potency) at both the glucagon receptor and the GLP-1 receptor. This fold difference can be alternatively expressed as ratios of glucagon/GLP-1, or GLP-1/GIP, or glucagon/GLP-1 as above.

### Structure of the Glucagon Superfamily Peptide (Q)

[0187] The glucagon superfamily peptide (Q) described herein can comprise an amino acid sequence which is based on the amino acid sequence of native human glucagon (SEQ ID NO: 1601), native human GLP-1 (SEQ ID NOs: 1603 or 1604), or native human GIP (SEQ ID NO: 1607).

### Based on Native Human Glucagon

[0188] In some aspects of the invention, the glucagon superfamily peptide (Q) comprises an amino acid sequence that is based on the amino acid sequence of native human glucagon (SEQ ID NO: 1601). In some aspects, Q comprises a modified amino acid sequence of SEQ ID NO: 1601 comprising 1, 2, 3, 4, 5, 6, 7, 8, 9, 10, 11, 12, 13, 14, 15, and in some instances, 16 or more (e.g., 17, 18, 19, 20, 21, 22, 23, 24, 25, etc.), amino acid modifications. In some embodiments, Q comprises a total of 1, up to 2, up to 3, up to 4, up to 5, up to 6, up to 7, up to 8, up to 9, or up to 10 amino acid modifications relative to the native human glucagon sequence (SEQ ID NO: 1601). In some embodiments, the modifications are any of those described herein, e.g., acylation, alkylation, pegylation, truncation at C-terminus, substitution of the amino acid at one or more of positions 1, 2, 3, 7, 10, 12, 15, 16, 17, 18, 19, 20, 21, 23, 24, 27, 28, and 29.

[0189] In some embodiments, Q comprises an amino acid sequence which has at least 25% sequence identity to the amino acid sequence of native human glucagon (SEQ ID NO: 1601). In some embodiments, Q comprises an amino acid sequence which is at least 30%, at least 40%, at least 50%, at least 60%, at least 70%, at least 80%, at least 85%, at least 90% or has greater than 90% sequence identity to SEQ ID NO: 1601. In some embodiments, the amino acid sequence of Q, which has the above-referenced % sequence identity is the full-length amino acid sequence of Q. In some embodiments, the amino acid sequence of Q which has the above-referenced % sequence identity is only a portion of the amino acid sequence of Q. In some embodiments, Q comprises an amino acid sequence which has about A % or greater sequence identity to a reference amino acid sequence of at least 5 contiguous amino acids (e.g., at least 6, at least 7, at least 8, at least 9, at least 10 amino acids) of SEQ ID NO: 1601, wherein the reference amino acid sequence begins with the amino acid at position C of SEQ ID NO: 1601 and ends with the amino acid at position D of SEQ ID NO: 1601, wherein A is 25, 30, 35, 40, 45, 50, 55, 60, 65, 70, 75, 80, 85, 90, 91, 92, 93, 94, 95, 96, 97, 98, 99; C is 1, 2, 3, 4, 5, 6, 7, 8, 9, 10, 11, 12, 13, 14, 15, 16, 17, 18, 19, 20, 21, 22, 23, 24, 25, 26, 27, or 28 and D is 5, 6, 7, 8, 9, 10, 11, 12, 13, 14, 15, 16, 17, 18, 19, 20, 21, 22, 23, 24, 25, 26, 27, 28 or 29. Any and all possible combinations of the foregoing parameters are envisioned, including but not limited to, e.g., wherein A is 90% and C and D are 1 and 27, or 6 and 27, or 8 and 27, or 10 and 27, or 12 and 27, or 16 and 27.

### Based on Native Human GLP-1

[0190] In some aspects of the invention, the glucagon superfamily peptide (Q) comprises an amino acid sequence that is based on the amino acid sequence of native human GLP-1 (SEQ ID NO: 1603). In some aspects, Q comprises a modified amino acid sequence of SEQ ID NO: 1603 comprising 1, 2, 3, 4, 5, 6, 7, 8, 9, 10, 11, 12, 13, 14, 15, and in some instances, 16 or more (e.g., 17, 18, 19, 20, 21, 22, 23, 24, 25, etc.), amino acid modifications. In some embodiments, Q comprises a total of 1, up to 2, up to 3, up to 4, up to 5, up to 6, up to 7, up to 8, up to 9, or up to 10 amino acid modifications relative to the native human GLP-1 sequence (SEQ ID NO: 1603). In some embodiments, the modifications are any of those described herein, e.g., acylation, alkylation, pegylation, truncation at C-terminus, substitution of the amino acid at one or more of positions 1, 2, 3, 7, 10, 12, 15, 16, 17, 18, 19, 20, 21, 23, 24, 27, 28, and 29.

[0191] In some embodiments, Q comprises an amino acid sequence which has at least 25% sequence identity to the amino acid sequence of native human GLP-1 (SEQ ID NO: 1603). In some embodiments, Q comprises an amino acid sequence which is at least 30%, at least 40%, at least 50%, at least 60%, at least 70%, at least 80%, at least 85%, at least 90% or has greater than 90% sequence identity to SEQ ID NO: 1603. In some embodiments, the amino acid sequence of Q, which has the above-referenced % sequence identity is the full-length amino acid sequence of Q. In some embodiments, the amino acid sequence of Q which has the above-referenced % sequence identity is only a portion of the amino acid sequence of Q. In some embodiments, Q comprises an amino acid sequence which has about A % or greater sequence identity to a reference amino acid sequence of at least 5 contiguous amino acids (e.g., at least 6, at least 7, at least 8, at least 9, at least 10 amino acids) of SEQ ID NO: 1603, wherein the reference amino acid sequence begins with the amino acid at position C of SEQ ID NO: 1603 and ends with the amino acid at position D of SEQ ID NO: 1603, wherein A is 25, 30, 35, 40, 45, 50, 55, 60, 65, 70, 75, 80, 85, 90, 91, 92, 93, 94, 95, 96, 97, 98, 99; C is 1, 2, 3, 4, 5, 6, 7, 8, 9, 10, 11, 12, 13, 14, 15, 16, 17, 18, 19, 20, 21, 22, 23, 24, 25, 26, 27, or 28 and D is 5, 6, 7, 8, 9, 10, 11, 12, 13, 14, 15, 16, 17, 18, 19, 20, 21, 22, 23, 24, 25, 26, 27, 28 or 29. Any and all possible combinations of the foregoing parameters are envisioned, including but not limited to, e.g., wherein A is 90% and C and D are 1 and 27, or 6 and 27, or 8 and 27, or 10 and 27, or 12 and 27, or 16 and 27.

### Based on Native Human GIP

[0192] In some embodiments of the present disclosures, Q is an analog of native human GIP, the amino acid sequence of which is provided herein as SEQ ID NO: 1607. Accordingly, in some embodiments, Q comprises an amino acid sequence which is based on the amino acid sequence of SEQ ID NO: 1607 but is modified with 1, 2, 3, 4, 5, 6, 7, 8, 9, 10, 11, 12, 13, 14, 15, and in some instances, 16 or more (e.g., 17, 18, 19, 20, 21, 22, 23, 24, 25, etc.), amino acid modifications. In some embodiments, Q comprises a total of 1, up to 2, up to 3, up to 4, up to 5, up to 6, up to 7, up to 8, up to 9, or up to 10 amino acid modifications relative to the native human GIP sequence (SEQ ID NO: 1607). In some embodiments, the modifications are any of those described herein, e.g., acylation, alkylation, pegylation, truncation at C-terminus, substitution of the amino acid at one or more of positions 1, 2, 3, 7, 10, 12, 15, 16, 17, 18, 19, 20, 21, 23, 24, 27, 28, and 29. Exemplary GIP receptor agonists are known in the art. See, for example, Irwin et al., J Pharm and Expmt Ther 314(3): 1187-1194 (2005); Salhanick et al., Bioorg Med Chem Lett 15(18): 4114-4117 (2005); Green et al., Dibetes 7(5): 595-604 (2005); O'Harte et al., J Endocrinol 165(3): 639-648 (2000); O'Harte et al., Diabetologia 45(9): 1281-1291 (2002); Gault et al., Biochem J 367 (Pt3): 913-920 (2002); Gault et al., J Endocrin 176: 133-141 (2003); Irwin et al., Diabetes Obes Metab. 11(6): 603-610 (epub 2009).

[0193] In some embodiments, Q comprises an amino acid sequence which has at least 25% sequence identity to the amino acid sequence of native human GIP (SEQ ID NO: 1607). In some embodiments, Q comprises an amino acid sequence which is at least 30%, at least 40%, at least 50%, at least 60%, at least 70%, at least 80%, at least 85%, at least 90% or has greater than 90% sequence identity to SEQ ID NO: 1607. In some embodiments, the amino acid sequence of Q which has the above-referenced % sequence identity is the full-length amino acid sequence of Q. In some embodiments, the amino acid sequence of Q which has the above-referenced % sequence identity is only a portion of the amino acid sequence of Q. In some embodiments, Q comprises an amino acid sequence which has about A % or greater sequence identity to a reference amino acid sequence of at least 5 contiguous amino acids (e.g., at least 6, at least 7, at least 8, at least 9, at least 10 amino acids) of SEQ ID NO: 1607, wherein the reference amino acid sequence begins with the amino acid at position C of SEQ ID NO: 1607 and ends with the amino acid at position D of SEQ ID NO: 1607, wherein A is 25, 30, 35, 40, 45, 50, 55, 60, 65, 70, 75, 80, 85, 90, 91, 92, 93, 94, 95, 96, 97, 98, 99; C is 1, 2, 3, 4, 5, 6, 7, 8, 9, 10, 11, 12, 13, 14, 15, 16, 17, 18, 19, 20, 21, 22, 23, 24, 25, 26, 27, or 28 and D is 5, 6, 7, 8, 9, 10, 11, 12, 13, 14, 15, 16, 17, 18, 19, 20, 21, 22, 23, 24, 25, 26, 27, 28 or 29. Any and all possible combinations of the foregoing parameters are envisioned, including but not limited to, e.g., wherein A is 90% and C and D are 1 and 27, or 6 and 27, or 8 and 27, or 10 and 27, or 12 and 27, or 16 and 27.

### Modifications

[0194] Where Q is a glucagon related peptide, Q can comprise the native glucagon amino acid sequence (SEQ ID NO: 1601) with modifications. In exemplary embodiments, the glucagon related peptide may comprise a total of 1, up to 2, up to 3, up to 4, up to 5, up to 6, up to 7, up to 8, up to 9, or up to 10 amino acid modifications relative to the native glucagon sequence, e.g. conservative or non-conservative substitutions. Modifications and substitutions described herein are, in certain aspects made at specific positions within Q wherein the numbering of the position corresponds to the numbering of glucagon (SEQ ID NO: 1601). In some embodiments 1, 2, 3, 4 or 5 non-conservative substitutions are carried out at any of positions 2, 5, 7, 10, 11, 12, 13, 14, 17, 18, 19, 20, 21, 24, 27, 28 or 29 and up to 5 further conservative substitutions are carried out at any of these positions. In some embodiments 1, 2, or 3 amino acid modifications are carried out within amino acids at positions 1-16, and 1, 2 or 3 amino acid modifications are carried out within amino acids at positions 17-26. In some embodiments, Q retains at least 22, 23, 24, 25, 26, 27 or 28 of the naturally occurring amino acids at the corresponding positions in native glucagon (e.g. have 1-7, 1-5 or 1-3 modifications relative to naturally occurring glucagon).

### DPP-IV Resistance

[0195] In some embodiments, where Q is a glucagon superfamily peptide, Q comprises a modification at position 1 or 2 to reduce susceptibility to cleavage by dipeptidyl peptidase IV (DPP-IV). More particularly, in some embodiments, position 1 of Q (e.g., selected from those in FIG. 1) is substituted with an amino acid selected from the group consisting of D-histidine, alpha, alpha-dimethyl imidiazole acetic acid (DMIA), N-methyl histidine, alpha-methyl histidine, imidazole acetic acid, desaminohistidine, hydroxyl-histidine, acetyl-histidine and homo-histidine. More particularly, in some embodiments, position 2 of Q is substituted with an amino acid selected from the group consisting of D-serine, D-alanine, valine, glycine, N-methyl serine, and aminoisobutyric acid. In some embodiments, position 2 of the glucagon related peptide is not D-serine.

### Glucagon Modification at Position 3

[0196] Glucagon related peptides of Classes 1 to 3 described herein may be modified at position 3 (according to the amino acid numbering of wild type glucagon) to maintain or increase activity at the glucagon receptor.

[0197] In some embodiments in which Q is a Class 1, Class 2, or Class 3 glucagon related peptide, maintained or enhanced activity at the glucagon receptor may be achieved by modifying the Gln at position 3 with a glutamine analog. For example, a Class 1, Class 2, or Class 3 glucagon related peptide comprising a glutamine analog at position 3 may exhibit about 5%, about 10%, about 20%, about 50%, or about 85% or greater the activity of native glucagon (SEQ ID NO: 1601) at the glucagon receptor. In some embodiments a Class 1, Class 2, or Class 3 glucagon related peptide comprising a glutamine analog at position 3 may exhibit about 20%, about 50%, about 75%, about 100%, about 200% or about 500% or greater the activity of a corresponding glucagon peptide having the same amino acid sequence as the peptide comprising the glutamine analog, except for the modified amino acid at position 3 at the glucagon receptor. In some embodiments, a Class 1, Class 2, or Class 3 glucagon related peptide comprising a glutamine analog at position 3 exhibits enhanced activity at the glucagon receptor, but the enhanced activity is no more than 1000%, 10,000%, 100,000%, or 1,000,000% of the activity of native glucagon or of a corresponding glucagon related peptide having the same amino acid sequence as the peptide comprising the glutamine analog, except for the modified amino acid at position 3.

[0198] In some embodiments, the glutamine analog is a naturally occurring or a non-naturally occurring amino acid comprising a side chain of Structure I, II or III:

[chemical structure]

wherein R¹ is C₀₋₃ alkyl or C₀₋₃ heteroalkyl; R² is NHR⁴ or C₁₋₃ alkyl; R³ is C₁₋₃ alkyl; R⁴ is H or C₁₋₃ alkyl; X is NH, O, or S; and Y is NHR⁴, SR³, or OR³. In some embodiments, X is NH or Y is NHR⁴. In some embodiments, R¹ is C₀₋₂ alkyl or C₁ heteroalkyl. In some embodiments, R² is NHR⁴ or C₁ alkyl. In some embodiments, R⁴ is H or C¹ alkyl. In exemplary embodiments in which Q is a Class 1, Class 2, or Class 3 glucagon related peptide, an amino acid comprising a side chain of Structure I is provided where, R¹ is CH₂—S, X is NH, and R² is CH₃ (acetamidomethyl-cysteine, C(Acm)); R¹ is CH₂, X is NH, and R² is CH₃ (acetyldiaminobutanoic acid, Dab(Ac)); R¹ is C₀ alkyl, X is NH, R² is NHR⁴, and R⁴ is H (carbamoyldiaminopropanoic acid, Dap(urea)); or R¹ is CH₂—CH₂, X is NH, and R² is CH₃ (acetylornithine, Orn(Ac)). In exemplary embodiments an amino acid comprising a side chain of Structure II is provided where, R¹ is CH₂, Y is NHR⁴, and R⁴ is CH₃ (methylglutamine, Q(Me)); In exemplary embodiments an amino acid comprising a side chain of Structure IIII is provided where, R¹ is CH₂ and R⁴ is H (methionine-sulfoxide, M(O)); In specific embodiments, the amino acid at position 3 is substituted with Dab(Ac).

### Acylation of Q

[0199] In some embodiments, the glucagon related peptide (e.g. a Class 1 glucagon related peptide, Class 2 glucagon related peptide, Class 3 glucagon related peptide, Class 4 glucagon related peptide, Class 4 glucagon related peptides or Class 5 glucagon related peptide), Q is modified to comprise an acyl group. The acyl group can be covalently linked directly to an amino acid of the peptide Q, or indirectly to an amino acid of Q via a spacer, wherein the spacer is positioned between the amino acid of Q and the acyl group. Q may be acylated at the same amino acid position where a hydrophilic moiety is linked, or at a different amino acid position. As described herein, Q can be a glucagon superfamily peptide, glucagon related peptide, including a Class 1, 2, 3, 4 or 5 glucagon related peptide, or osteocalcin, calcitonin, amylin, or an analog, derivative or conjugate thereof. For example, Q may be one of Class 1, Class 2, Class 3, Class 4 or Class 5, and may comprise an acyl group which is non-native to a naturally-occurring amino acid. Acylation can be carried out at any position within Q. Where Q is a glucagon related peptide, acylation may occur at any position including any of positions 1-29, a position within a C-terminal extension, or the C-terminal amino acid, provided that the activity exhibited by the non-acylated glucagon related peptide is retained upon acylation. For example, if the unacylated peptide has glucagon agonist activity, then the acylated peptide retains the glucagon agonist activity. Also for example, if the unacylated peptide has glucagon antagonist activity, then the acylated peptide retains the glucagon antagonist activity. For instance, if the unacylated peptide has GLP-1 agonist activity, then the acylated peptide retains GLP-1 agonist activity. Nonlimiting examples include acylation at positions 5, 7, 10, 11, 12, 13, 14, 16, 17, 18, 19, 20, 21, 24, 27, 28, or 29 (according to the amino acid numbering of wild type glucagon). With regard to Class 1, Class 2, and Class 3 glucagon related peptides, acylation may occur at any of positions 5, 7, 10, 11, 12, 13, 14, 16, 17, 18, 19, 20, 21, 24, 27, 28, 29, 30, 37, 38, 39, 40, 41, 42, or 43 (according to the amino acid numbering of wild type glucagon). Other nonlimiting examples with respect to glucagon related peptides (e.g., Class 1, 2, 3, 4, or 5) include acylation at position 10 (according to the amino acid numbering of the wild type glucagon) and pegylation at one or more positions in the C-terminal portion of the glucagon peptide, e.g., position 24, 28 or 29 (according to the amino acid numbering of the wild type glucagon), within a C-terminal extension, or at the C-terminus (e.g., through adding a C-terminal Cys).

[0200] In a specific aspect of the invention, peptide Q (e.g., a glucagon superfamily peptide, a glucagon related peptide, a Class 1, 2, 3, 4 or 5 glucagon related peptide, or osteocalcin, calcitonin, amylin, or an analog, derivative or conjugate thereof) is modified to comprise an acyl group by direct acylation of an amine, hydroxyl, or thiol of a side chain of an amino acid of Q. In some embodiments, Q is directly acylated through the side chain amine, hydroxyl, or thiol of an amino acid. In some embodiments, where Q is a glucagon related peptide, acylation is at position 10, 20, 24, or 29 (according to the amino acid numbering of the wild type glucagon). In this regard, the acylated glucagon related peptide can comprise the amino acid sequence of SEQ ID NO: 1601, or a modified amino acid sequence thereof comprising one or more of the amino acid modifications described herein, with at least one of the amino acids at positions 10, 20, 24, and 29 (according to the amino acid numbering of the wild type glucagon) modified to any amino acid comprising a side chain amine, hydroxyl, or thiol. In some specific embodiments of the invention, where Q is a glucagon related peptide, the direct acylation of the Q occurs through the side chain amine, hydroxyl, or thiol of the amino acid at position 10 (according to the amino acid numbering of the wild type glucagon).

[0201] In some embodiments, the amino acid of peptide Q (e.g., a glucagon superfamily peptide, a glucagon related peptide, a Class 1, 2, 3, 4 or 5 glucagon related peptide, or osteocalcin, calcitonin, amylin, or an analog, derivative or conjugate thereof) comprising a side chain amine is an amino acid of Formula I:

[chemical structure]

In some exemplary embodiments, the amino acid of Formula I, is the amino acid wherein n is 4 (Lys) or n is 3 (Orn).

[0202] In other embodiments, the amino acid of peptide Q comprising a side chain hydroxyl is an amino acid of Formula II:

[chemical structure]

In some exemplary embodiments, the amino acid of Formula II is the amino acid wherein n is 1 (Ser).

[0203] In yet other embodiments, the amino acid of peptide Q comprising a side chain thiol is an amino acid of Formula III:

[chemical structure]

In some exemplary embodiments, the amino acid of Formula III is the amino acid wherein n is 1 (Cys).

[0204] In yet other embodiments, the amino acid of peptide Q comprising a side chain amine, hydroxyl, or thiol is a disubstituted amino acid comprising the same structure of Formula I, Formula II, or Formula III, except that the hydrogen bonded to the alpha carbon of the amino acid of Formula I, Formula II, or Formula III is replaced with a second side chain.

[0205] In some embodiments of the invention, the acylated peptide Q (e.g., a glucagon superfamily peptide, a glucagon related peptide, a Class 1, 2, 3, 4 or 5 glucagon related peptide, or osteocalcin, calcitonin, amylin, or an analog, derivative or conjugate thereof) comprises a spacer between the peptide and the acyl group. In some embodiments, Q is covalently bound to the spacer, which is covalently bound to the acyl group. In some exemplary embodiments, Q is modified to comprise an acyl group by acylation of an amine, hydroxyl, or thiol of a spacer, which spacer (where Q is a glucagon related peptide, e.g., Class 1, 2, 3, 4 or 5) is attached to a side chain of an amino acid at position 10, 20, 24, or 29 (according to the amino acid numbering of the wild type glucagon), or at the C-terminal amino acid of the glucagon related peptide. The amino acid of peptide Q to which the spacer is attached can be any amino acid comprising a moiety which permits linkage to the spacer. For example, an amino acid comprising a side chain —NH₂, —OH, or —COOH (e.g., Lys, Orn, Ser, Asp, or Glu) is suitable. An amino acid of peptide Q (e.g., a singly or doubly α-substituted amino acid) comprising a side chain —NH₂, —OH, or —COOH (e.g., Lys, Orn, Ser, Asp, or Glu) is also suitable. In some embodiments where Q is a glucagon related peptide (e.g., Class 1, 2, 3, 4 or 5), the acylated glucagon related peptide can comprise the amino acid sequence of SEQ ID NO: 1601, or a modified amino acid sequence thereof comprising one or more of the amino acid modifications described herein, with at least one of the amino acids at positions 10, 20, 24, and 29 (according to the amino acid numbering of the wild type glucagon) modified to any amino acid comprising a side chain amine, hydroxyl, or carboxylate.

[0206] In some embodiments, the spacer between the peptide Q and the acyl group is an amino acid comprising a side chain amine, hydroxyl, or thiol, or a dipeptide or tripeptide comprising an amino acid comprising a side chain amine, hydroxyl, or thiol. In some embodiments, the amino acid spacer is not γ-Glu. In some embodiments, the dipeptide spacer is not γ-Glu-γ-Glu.

[0207] When acylation occurs through an amine group of the amino acid of the spacer, the acylation can occur through the alpha amine of the amino acid or a side chain amine. In the instance in which the alpha amine is acylated, the spacer amino acid can be any amino acid. For example, the spacer amino acid can be a hydrophobic amino acid, e.g., Gly, Ala, Val, Leu, Ile, Trp, Met, Phe, Tyr. In some embodiments, the spacer amino acid can be, for example, a hydrophobic amino acid, e.g., Gly, Ala, Val, Leu, Ile, Trp, Met, Phe, Tyr, 6-amino hexanoic acid, 5-aminovaleric acid, 7-aminoheptanoic acid, 8-aminooctanoic acid. Alternatively, the spacer amino acid can be an acidic residue, e.g., Asp and Glu. In the instance in which the side chain amine of the spacer amino acid is acylated, the spacer amino acid is an amino acid comprising a side chain amine, e.g., an amino acid of Formula I (e.g., Lys or Orn). In this instance, it is possible for both the alpha amine and the side chain amine of the spacer amino acid to be acylated, such that the peptide is diacylated. Embodiments of the invention include such diacylated molecules.

[0208] When acylation occurs through a hydroxyl group of the amino acid of the spacer, the amino acid or one of the amino acids of the dipeptide or tripeptide can be an amino acid of Formula II. In a specific exemplary embodiment, the amino acid is Ser. When acylation occurs through a thiol group of the amino acid of the spacer, the amino acid or one of the amino acids of the dipeptide or tripeptide can be an amino acid of Formula III. In a specific exemplary embodiment, the amino acid is Cys.

[0209] In some embodiments, the spacer comprises a hydrophilic bifunctional spacer. In a specific embodiment, the spacer comprises an amino poly(alkyloxy)carboxylate. In this regard, the spacer can comprise, for example, NH₂(CH₂CH₂O)ₙ(CH₂)ₘCOOH, wherein m is any integer from 1 to 6 and n is any integer from 2 to 12, such as, e.g., 8-amino-3,6-dioxaoctanoic acid, which is commercially available from Peptides International, Inc. (Louisville, Ky.).

[0210] In some embodiments the spacer between peptide Q and the acyl group comprises a hydrophilic bifunctional spacer. In certain embodiments, the hydrophilic bifunctional spacer comprises two or more reactive groups, e.g., an amine, a hydroxyl, a thiol, and a carboxyl group or any combinations thereof. In certain embodiments, the hydrophilic bifunctional spacer comprises a hydroxyl group and a carboxylate. In other embodiments, the hydrophilic bifunctional spacer comprises an amine group and a carboxylate. In other embodiments, the hydrophilic bifunctional spacer comprises a thiol group and a carboxylate.

[0211] In some embodiments, the spacer between peptide Q and the acyl group is a hydrophobic bifunctional spacer. Hydrophobic bifunctional spacers are known in the art. See, e.g., Bioconjugate Techniques, G. T. Hermanson (Academic Press, San Diego, Calif., 1996), which is incorporated by reference in its entirety. In certain embodiments, the hydrophobic bifunctional spacer comprises two or more reactive groups, e.g., an amine, a hydroxyl, a thiol, and a carboxyl group or any combinations thereof. In certain embodiments, the hydrophobic bifunctional spacer comprises a hydroxyl group and a carboxylate. In other embodiments, the hydrophobic bifunctional spacer comprises an amine group and a carboxylate. In other embodiments, the hydrophobic bifunctional spacer comprises a thiol group and a carboxylate. Suitable hydrophobic bifunctional spacers comprising a carboxylate and a hydroxyl group or a thiol group are known in the art and include, for example, 8-hydroxyoctanoic acid and 8-mercaptooctanoic acid.

[0212] In some embodiments, the bifunctional spacer is not a dicarboxylic acid comprising an unbranched, methylene of 1 to 7 carbon atoms between the carboxylate groups. In some embodiments, the bifunctional spacer is a dicarboxylic acid comprising an unbranched, methylene of 1-7 carbon atoms between the carboxylate groups.

[0213] The spacer (e.g., amino acid, dipeptide, tripeptide, hydrophilic bifunctional spacer, or hydrophobic bifunctional spacer) in specific embodiments, wherein Q is a Class 1, Class 2, or Class 3 glucagon related peptide, is 3 to 10 atoms (e.g., 6 to 10 atoms, (e.g., 6, 7, 8, 9, or 10 atoms) in length. In more specific embodiments in which Q is a Class 1, Class 2, or Class 3 glucagon related peptide, the spacer is about 3 to 10 atoms (e.g., 6 to 10 atoms) in length and the acyl group is a C12 to C18 fatty acyl group, e.g., C14 fatty acyl group, C16 fatty acyl group, such that the total length of the spacer and acyl group is 14 to 28 atoms, e.g., about 14, 15, 16, 17, 18, 19, 20, 21, 22, 23, 24, 25, 26, 27, or 28 atoms. In some embodiments, in which Q is a Class 1, Class 2, or Class 3 glucagon related peptide the length of the spacer and acyl group is 17 to 28 (e.g., 19 to 26, 19 to 21) atoms.

[0214] In accordance with certain embodiments in which Q is a Class 1, Class 2, or Class 3 glucagon related peptide, the bifunctional spacer can be a synthetic or naturally occurring amino acid (including, but not limited to, any of those described herein) comprising an amino acid backbone that is 3 to 10 atoms in length (e.g., 6-amino hexanoic acid, 5-aminovaleric acid, 7-aminoheptanoic acid, and 8-aminooctanoic acid). Alternatively, the spacer attached to the Class 1, Class 2, or Class 3 glucagon related peptide can be a dipeptide or tripeptide spacer having a peptide backbone that is 3 to 10 atoms (e.g., 6 to 10 atoms) in length. Each amino acid of the dipeptide or tripeptide spacer attached to the Class 1, Class 2, or Class 3 glucagon related peptide can be the same as or different from the other amino acid(s) of the dipeptide or tripeptide and can be independently selected from the group consisting of: naturally-occurring and/or non-naturally occurring amino acids, including, for example, any of the D or L isomers of the naturally-occurring amino acids (Ala, Cys, Asp, Glu, Phe, Gly, His, Ile, Lys, Leu, Met, Asn, Pro, Arg, Ser, Thr, Val, Trp, Tyr), or any D or L isomers of the non-naturally occurring amino acids selected from the group consisting of: β-alanine (β3-Ala), N-α-methyl-alanine (Me-Ala), aminobutyric acid (Abu), α-aminobutyric acid (γ-Abu), aminohexanoic acid (ε-Ahx), aminoisobutyric acid (Aib), aminomethylpyrrole carboxylic acid, aminopiperidinecarboxylic acid, aminoserine (Ams), aminotetrahydropyran-4-carboxylic acid, arginine N-methoxy-N-methyl amide, β-aspartic acid (β-Asp), azetidine carboxylic acid, 3-(2-benzothiazolyl)alanine, α-tert-butylglycine, 2-amino-5-ureido-n-valeric acid (citrulline, Cit), β-Cyclohexylalanine (Cha), acetamidomethyl-cysteine, diaminobutanoic acid (Dab), diaminopropionic acid (Dpr), dihydroxyphenylalanine (DOPA), dimethylthiazolidine (DMTA), γ-Glutamic acid (γ-Glu), homoserine (Hse), hydroxyproline (Hyp), isoleucine N-methoxy-N-methyl amide, methyl-isoleucine (MeIle), isonipecotic acid (Isn), methyl-leucine (MeLeu), methyl-lysine, dimethyl-lysine, trimethyl-lysine, methanoproline, methionine-sulfoxide (Met(O)), methionine-sulfone (Met(O2)), norleucine (Nle), methyl-norleucine (Me-Nle), norvaline (Nva), ornithine (Orn), para-aminobenzoic acid (PABA), penicillamine (Pen), methylphenylalanine (MePhe), 4-Chlorophenylalanine (Phe(4-Cl)), 4-fluorophenylalanine (Phe(4-F)), 4-nitrophenylalanine (Phe(4-NO2)), 4-cyanophenylalanine ((Phe(4-CN)), phenylglycine (Phg), piperidinylalanine, piperidinylglycine, 3,4-dehydroproline, pyrrolidinylalanine, sarcosine (Sar), selenocysteine (Sec), O-Benzyl-phosphoserine, 4-amino-3-hydroxy-6-methylheptanoic acid (Sta), 4-amino-5-cyclohexyl-3-hydroxypentanoic acid (ACHPA), 4-amino-3-hydroxy-5-phenylpentanoic acid (AHPPA), 1,2,3,4,-tetrahydro-isoquinoline-3-carboxylic acid (Tic), tetrahydropyranglycine, thienylalanine (Thi), O-benzyl-phosphotyrosine, O-Phosphotyrosine, methoxytyrosine, ethoxytyrosine, O-(bis-dimethylamino-phosphono)-tyrosine, tyrosine sulfate tetrabutylamine, methyl-valine (MeVal), 1-amino-1-cyclohexane carboxylic acid (Acx), aminovaleric acid, beta-cyclopropyl-alanine (Cpa), propargylglycine (Prg), allylglycine (Alg), 2-amino-2-cyclohexyl-propanoic acid (2-Cha), tertbutylglycine (Tbg), vinylglycine (Vg), 1-amino-1-cyclopropane carboxylic acid (Acp), 1-amino-1-cyclopentane carboxylic acid (Acpe), alkylated 3-mercaptopropionic acid, 1-amino-1-cyclobutane carboxylic acid (Acb).

[0215] In some embodiments in which Q is a Class 1, Class 2, or Class 3 glucagon related peptide, the spacer comprises an overall negative charge, e.g., comprises one or two negatively charged amino acids. In some embodiments in which Q is a Class 1, Class 2, or Class 3 glucagon related peptide, the dipeptide is not any of the dipeptides of general structure A-B, wherein A is selected from the group consisting of Gly, Gln, Ala, Arg, Asp, Asn, Ile, Leu, Val, Phe, and Pro, wherein B is selected from the group consisting of Lys, His, Trp. In some embodiments in which Q is a Class 1, Class 2, or Class 3 glucagon related peptide, the dipeptide spacer is selected from the group consisting of: Ala-Ala, β-Ala-β-Ala, Leu-Leu, Pro-Pro, γ-aminobutyric acid-γ-aminobutyric acid, and γ-Glu-γ-Glu.

[0216] The peptide Q can be modified to comprise an acyl group by acylation of a long chain alkane. In specific aspects, the long chain alkane comprises an amine, hydroxyl, or thiol group (e.g. octadecylamine, tetradecanol, and hexadecanethiol) which reacts with a carboxyl group, or activated form thereof, of the peptide Q. The carboxyl group, or activated form thereof, of Q can be part of a side chain of an amino acid (e.g., glutamic acid, aspartic acid) of Q or can be part of the peptide backbone.

[0217] In certain embodiments, the peptide Q is modified to comprise an acyl group by acylation of the long chain alkane by a spacer which is attached to Q. In specific aspects, the long chain alkane comprises an amine, hydroxyl, or thiol group which reacts with a carboxyl group, or activated form thereof, of the spacer. Suitable spacers comprising a carboxyl group, or activated form thereof, are described herein and include, for example, bifunctional spacers, e.g., amino acids, dipeptides, tripeptides, hydrophilic bifunctional spacers and hydrophobic bifunctional spacers.

[0218] As used herein, the term “activated form of a carboxyl group” refers to a carboxyl group with the general formula R(C═O)X, wherein X is a leaving group and R is Q or the spacer. For example, activated forms of a carboxyl groups may include, but are not limited to, acyl chlorides, anhydrides, and esters. In some embodiments, the activated carboxyl group is an ester with a N-hydroxysuccinimide (NHS) leaving group.

[0219] With regard to these aspects of the invention, in which a long chain alkane is acylated by the peptide Q or the spacer, the long chain alkane may be of any size and can comprise any length of carbon chain. The long chain alkane can be linear or branched. In certain aspects, the long chain alkane is a C4 to C30 alkane. For example, the long chain alkane can be any of a C4 alkane, C6 alkane, C8 alkane, C10 alkane, C12 alkane, C14 alkane, C16 alkane, C18 alkane, C20 alkane, C22 alkane, C24 alkane, C26 alkane, C28 alkane, or a C30 alkane. In some embodiments, the long chain alkane comprises a C8 to C20 alkane, e.g., a C14 alkane, C16 alkane, or a C18 alkane.

[0220] In some embodiments, an amine, hydroxyl, or thiol group of Q is acylated with a cholesterol acid. In a specific embodiment, the peptide is linked to the cholesterol acid through an alkylated des-amino Cys spacer, i.e., an alkylated 3-mercaptopropionic acid spacer.

[0221] Suitable methods of peptide acylation via amines, hydroxyls, and thiols are known in the art. See, for example, Miller, Biochem Biophys Res Commun 218: 377-382 (1996); Shimohigashi and Stammer, Int J Pept Protein Res 19: 54-62 (1982); and Previero et al., Biochim Biophys Acta 263: 7-13 (1972) (for methods of acylating through a hydroxyl); and San and Silvius, J Pept Res 66: 169-180 (2005) (for methods of acylating through a thiol); Bioconjugate Chem. “Chemical Modifications of Proteins: History and Applications” pages 1, 2-12 (1990); Hashimoto et al., Pharmacuetical Res. “Synthesis of Palmitoyl Derivatives of Insulin and their Biological Activity” Vol. 6, No: 2 pp. 171-176 (1989).

[0222] The acyl group of the acylated peptide Q can be of any size, e.g., any length carbon chain, and can be linear or branched. In some specific embodiments of the invention, the acyl group is a C4 to C30 fatty acid. For example, the acyl group can be any of a C4 fatty acid, C6 fatty acid, C8 fatty acid, C10 fatty acid, C12 fatty acid, C14 fatty acid, C16 fatty acid, C18 fatty acid, C20 fatty acid, C22 fatty acid, C24 fatty acid, C26 fatty acid, C28 fatty acid, or a C30 fatty acid. In some embodiments, the acyl group is a C8 to C20 fatty acid, e.g., a C14 fatty acid or a C16 fatty acid.

[0223] In an alternative embodiment, the acyl group is a bile acid. The bile acid can be any suitable bile acid, including, but not limited to, cholic acid, chenodeoxycholic acid, deoxycholic acid, lithocholic acid, taurocholic acid, glycocholic acid, and cholesterol acid.

[0224] The acylated peptides Q described herein can be further modified to comprise a hydrophilic moiety. In some specific embodiments the hydrophilic moiety can comprise a polyethylene glycol (PEG) chain. The incorporation of a hydrophilic moiety can be accomplished through any suitable means, such as any of the methods described herein. In some embodiments related to Class 1, 2, 3, 4 or 5 glucagon related peptides, the acylated glucagon related peptide can comprise SEQ ID NO: 1601, including any of the modifications described herein, in which at least one of the amino acids at position 10, 20, 24, and 29 (according to the amino acid numbering of the wild type glucagon) comprise an acyl group and at least one of the amino acids at position 16, 17, 21, 24, or 29 (according to the amino acid numbering of the wild type glucagon), a position within a C-terminal extension, or the C-terminal amino acid are modified to a Cys, Lys, Orn, homo-Cys, or Ac-Phe, and the side chain of the amino acid is covalently bonded to a hydrophilic moiety (e.g., PEG). In some embodiments related to Class 1, 2, 3, 4 or 5 glucagon related peptides, the acyl group is attached to position 10 (according to the amino acid numbering of the wild type glucagon), optionally via a spacer comprising Cys, Lys, Orn, homo-Cys, or Ac-Phe, and the hydrophilic moiety is incorporated at a Cys residue at position 24.

[0225] Alternatively, the acylated peptide (Q) can comprise a spacer, wherein the spacer is both acylated and modified to comprise the hydrophilic moiety. Nonlimiting examples of suitable spacers include a spacer comprising one or more amino acids selected from the group consisting of Cys, Lys, Orn, homo-Cys, and Ac-Phe.

### Alkylation of Q

[0226] In some embodiments, Q is modified to comprise an alkyl group. The alkyl group can be covalently linked directly to an amino acid of the peptide Q, or indirectly to an amino acid of Q via a spacer, wherein the spacer is positioned between the amino acid of Q and the alkyl group. The alkyl group can be attached to Q via an ether, thioether, or amino linkage, for example. Q may be alkylated at the same amino acid position where a hydrophilic moiety is linked, or at a different amino acid position. As described herein, Q can be a glucagon superfamily peptide, glucagon related peptide, including a Class 1, 2, 3, 4 or 5 glucagon related peptide, or osteocalcin, calcitonin, amylin, or an analog, derivative or conjugate thereof. For example, Q may be a Class 1, Class 2, or Class 3 glucagon related peptide, and may comprise an alkyl group which is non-native to a naturally-occurring amino acid.

[0227] Alkylation can be carried out at any position within Q. Where Q is a glucagon related peptide, alkylation may occur at any position including any of positions 1-29, a position within a C-terminal extension, or the C-terminal amino acid, provided that an agonist activity of the unalkyated peptide with respect to glucagon, GLP-1, GIP or other glucagon-related peptide receptor is retained upon alkylation. In some embodiments, if the unalkylated peptide has glucagon agonist activity, then the alkylated peptide retains glucagon agonist activity is retained. In some embodiments, if the unalkylated peptide has GLP-1 agonist activity, then the alkylated peptide retains GLP-1 agonist activity. Nonlimiting examples include alkylation at positions 5, 7, 10, 11, 12, 13, 14, 16, 17, 18, 19, 20, 21, 24, 27, 28, or 29 (according to the amino acid numbering of wild type glucagon). With regard to Class 1, Class 2, and Class 3 glucagon related peptides, alkylation can occur at positions 5, 7, 10, 11, 12, 13, 14, 16, 17, 18, 19, 20, 21, 24, 27, 28, 29, 30, 37, 38, 39, 40, 41, 42, or 43 (according to the amino acid numbering of wild type glucagon). Other nonlimiting examples with respdect to glucagon related peptides (e.g. Class, 1, 2, 3, 4 or 5) include alkylation at position 10 (according to the amino acid numbering of wild type glucagon) and pegylation at one or more positions in the C-terminal portion of the glucagon related peptide, e.g., position 24, 28 or 29 (according to the amino acid numbering of wild type glucagon), within a C-terminal extension, or at the C-terminus (e.g., through adding a C-terminal Cys).

[0228] In a specific aspect of the invention, peptide Q (e.g. a glucagon superfamily peptide, a glucagon related peptide, a Class 1, 2, 3, 4 or 5 glucagon related peptide, or osteocalcin, calcitonin, amylin, or an analog, derivative or conjugate thereof) is modified to comprise an alkyl group by direct alkylation of an amine, hydroxyl, or thiol of a side chain of an amino acid of Q. In some embodiments, Q is directly alkylated through the side chain amine, hydroxyl, or thiol of an amino acid. In some embodiments, where Q is a glucagon related peptide, alkylation is at position 10, 20, 24, or 29 (according to the amino acid numbering of wild type glucagon). In this regard, the alkylated glucagon related peptide can comprise the amino acid sequence of SEQ ID NO: 1601, or a modified amino acid sequence thereof comprising one or more of the amino acid modifications described herein, with at least one of the amino acids at positions 10, 20, 24, and 29 (according to the amino acid numbering of wild type glucagon) modified to any amino acid comprising a side chain amine, hydroxyl, or thiol. In some specific embodiments of the invention, where Q is a glucagon related peptide, the direct alkylation of Q occurs through the side chain amine, hydroxyl, or thiol of the amino acid at position 10 (according to the amino acid numbering of wild type glucagon).

[0229] In some embodiments, the amino acid of peptide Q (e.g. a glucagon superfamily peptide, a glucagon related peptide, a Class 1, 2, 3, 4 or 5 glucagon related peptide, or osteocalcin, calcitonin, amylin, or an analog, derivative or conjugate thereof) comprising a side chain amine is an amino acid of Formula I. In some exemplary embodiments, the amino acid of Formula I, is the amino acid wherein n is 4 (Lys) or n is 3 (Orn).

[0230] In other embodiments, the amino acid of peptide Q comprising a side chain hydroxyl is an amino acid of Formula II. In some exemplary embodiments, the amino acid of Formula II is the amino acid wherein n is 1 (Ser).

[0231] In yet other embodiments, the amino acid of peptide Q comprising a side chain thiol is an amino acid of Formula III. In some exemplary embodiments, the amino acid of Formula II is the amino acid wherein n is 1 (Cys).

[0232] In yet other embodiments, the amino acid of peptide Q comprising a side chain amine, hydroxyl, or thiol is a disubstituted amino acid comprising the same structure of Formula I, Formula II, or Formula III, except that the hydrogen bonded to the alpha carbon of the amino acid of Formula I, Formula II, or Formula III is replaced with a second side chain.

[0233] In some embodiments of the invention, the alkylated peptide Q (e.g. a glucagon superfamily peptide, a glucagon related peptide, a Class 1, 2, 3, 4 or 5 glucagon related peptide, or osteocalcin, calcitonin, amylin, or an analog, derivative or conjugate thereof) comprises a spacer between the peptide and the alkyl group. In some embodiments, the Q is covalently bound to the spacer, which is covalently bound to the alkyl group. In some exemplary embodiments, peptide Q is modified to comprise an alkyl group by alkylation of an amine, hydroxyl, or thiol of a spacer, which spacer (where Q is a glucagon related peptide, e.g., Class 1, 2, 3, 4 or 5) is attached to a side chain of an amino acid at position 10, 20, 24, or 29 (according to the amino acid numbering of wild type glucagon) of Q. The amino acid of peptide Q to which the spacer is attached can be any amino acid comprising a moiety which permits linkage to the spacer. The amino acid of peptide Q to which the spacer is attached can be any amino acid (e.g., a singly α-substituted amino acid or an α,α-disubstituted amino acid) comprising a moiety which permits linkage to the spacer. An amino acid of peptide Q comprising a side chain —NH₂, —OH, or —COOH (e.g., Lys, Orn, Ser, Asp, or Glu) is suitable. In some embodiments where Q is a glucagon related peptide (e.g., Class 1, 2, 3, 4 or 5), the alkylated Q can comprise the amino acid sequence of SEQ ID NO: 1601, or a modified amino acid sequence thereof comprising one or more of the amino acid modifications described herein, with at least one of the amino acids at positions 10, 20, 24, and 29 (according to the amino acid numbering of wild type glucagon) modified to any amino acid comprising a side chain amine, hydroxyl, or carboxylate.

[0234] In some embodiments, the spacer between the peptide Q and the alkyl group is an amino acid comprising a side chain amine, hydroxyl, or thiol or a dipeptide or tripeptide comprising an amino acid comprising a side chain amine, hydroxyl, or thiol. In some embodiments, the amino acid spacer is not γ-Glu. In some embodiments, the dipeptide spacer is not γ-Glu-γ-Glu.

[0235] When alkylation occurs through an amine group of the amino acid of the spacer the alkylation can occur through the alpha amine of the amino acid or a side chain amine. In the instance in which the alpha amine is alkylated, the spacer amino acid can be any amino acid. For example, the spacer amino acid can be a hydrophobic amino acid, e.g., Gly, Ala, Val, Leu, Ile, Trp, Met, Phe, Tyr. Alternatively, the spacer amino acid can be an acidic residue, e.g., Asp and Glu. In exemplary embodiments, the spacer amino acid can be a hydrophobic amino acid, e.g., Gly, Ala, Val, Leu, Ile, Trp, Met, Phe, Tyr, 6-amino hexanoic acid, 5-aminovaleric acid, 7-aminoheptanoic acid, 8-aminooctanoic acid. Alternatively, the spacer amino acid can be an acidic residue, e.g., Asp and Glu, provided that the alkylation occurs on the alpha amine of the acidic residue. In the instance in which the side chain amine of the spacer amino acid is alkylated, the spacer amino acid is an amino acid comprising a side chain amine, e.g., an amino acid of Formula I (e.g., Lys or Orn). In this instance, it is possible for both the alpha amine and the side chain amine of the spacer amino acid to be alkylated, such that the peptide is dialkylated. Embodiments of the invention include such dialkylated molecules.

[0236] When alkylation occurs through a hydroxyl group of the amino acid of the spacer, the amino acid or one of the amino acids of the spacer can be an amino acid of Formula II. In a specific exemplary embodiment, the amino acid is Ser.

[0237] When alkylation occurs through a thiol group of the amino acid of the spacer, the amino acid or one of the amino acids of the spacer can be an amino acid of Formula III. In a specific exemplary embodiment, the amino acid is Cys.

[0238] In some embodiments, the spacer comprises a hydrophilic bifunctional spacer. In a specific embodiment, the spacer comprises an amino poly(alkyloxy)carboxylate. In this regard, the spacer can comprise, for example, NH₂(CH₂CH₂O)ₙ(CH₂)ₘCOOH, wherein m is any integer from 1 to 6 and n is any integer from 2 to 12, such as, e.g., 8-amino-3,6-dioxaoctanoic acid, which is commercially available from Peptides International, Inc. (Louisville, Ky.).

[0239] In some embodiments, the spacer between peptide Q and the alkyl group is a hydrophilic bifunctional spacer. In certain embodiments, the hydrophilic bifunctional spacer comprises two or more reactive groups, e.g., an amine, a hydroxyl, a thiol, and a carboxyl group or any combinations thereof. In certain embodiments, the hydrophilic bifunctional spacer comprises a hydroxyl group and a carboxylate. In other embodiments, the hydrophilic bifunctional spacer comprises an amine group and a carboxylate. In other embodiments, the hydrophilic bifunctional spacer comprises a thiol group and a carboxylate.

[0240] In some embodiments, the spacer between peptide Q and the alkyl group is a hydrophobic bifunctional spacer. In certain embodiments, the hydrophobic bifunctional spacer comprises two or more reactive groups, e.g., an amine, a hydroxyl, a thiol, and a carboxyl group or any combinations thereof. In certain embodiments, the hydrophobic bifunctional spacer comprises a hydroxyl group and a carboxylate. In other embodiments, the hydropholic bifunctional spacer comprises an amine group and a carboxylate. In other embodiments, the hydropholic bifunctional spacer comprises a thiol group and a carboxylate. Suitable hydrophobic bifunctional spacers comprising a carboxylate and a hydroxyl group or a thiol group are known in the art and include, for example, 8-hydroxyoctanoic acid and 8-mercaptooctanoic acid.

[0241] The spacer (e.g., amino acid, dipeptide, tripeptide, hydrophilic bifunctional spacer, or hydrophobic bifunctional spacer) in specific embodiments in which Q is a Class 1, Class 2, or Class 3 glucagon related peptide is 3 to 10 atoms (e.g., 6 to 10 atoms, (e.g., 6, 7, 8, 9, or 10 atoms)) in length. In more specific embodiments, the spacer attached to the Class 1, Class 2, or Class 3 glucagon related peptide is about 3 to 10 atoms (e.g., 6 to 10 atoms) in length and the alkyl is a C₁₂ to C₁₈ alkyl group, e.g., C₁₋₄ alkyl group, C₁₋₆ alkyl group, such that the total length of the spacer and alkyl group is 14 to 28 atoms, e.g., about 14, 15, 16, 17, 18, 19, 20, 21, 22, 23, 24, 25, 26, 27, or 28 atoms. In some embodiments in which Q is a Class 1, Class 2, or Class 3 glucagon related peptide, the length of the spacer and alkyl is 17 to 28 (e.g., 19 to 26, 19 to 21) atoms.

[0242] In accordance with certain foregoing embodiments in which Q is a Class 1, Class 2, or Class 3 glucagon related peptide, the bifunctional spacer can be a synthetic or non-naturally occurring amino acid comprising an amino acid backbone that is 3 to 10 atoms in length (e.g., 6-amino hexanoic acid, 5-aminovaleric acid, 7-aminoheptanoic acid, and 8-aminooctanoic acid). Alternatively, the spacer attached to the Class 1, Class 2, or Class 3 glucagon related peptide can be a dipeptide or tripeptide spacer having a peptide backbone that is 3 to 10 atoms (e.g., 6 to 10 atoms) in length. The dipeptide or tripeptide spacer attached to the Class 1, Class 2, or Class 3 glucagon related peptide can be composed of naturally-occurring and/or non-naturally occurring amino acids, including, for example, any of the amino acids taught herein. In some embodiments in which Q is a Class 1, Class 2, or Class 3 glucagon related peptide, the spacer comprises an overall negative charge, e.g., comprises one or two negatively charged amino acids. In some embodiments in which Q is a Class 1, Class 2, or Class 3 glucagon related peptide, the dipeptide spacer is selected from the group consisting of: Ala-Ala, β-Ala-β-Ala, Leu-Leu, Pro-Pro, γ-aminobutyric acid-γ-aminobutyric acid, and γ-Glu-γ-Glu. In some embodiments, the dipeptide spacer is not γ-Glu-γ-Glu.

[0243] Suitable methods of peptide alkylation via amines, hydroxyls, and thiols are known in the art. For example, a Williamson ether synthesis can be used to form an ether linkage between the glucagon related peptide and the alkyl group. Also, a nucleophilic substitution reaction of the peptide with an alkyl halide can result in any of an ether, thioether, or amino linkage.

[0244] The alkyl group of the alkylated peptide Q can be of any size, e.g., any length carbon chain, and can be linear or branched. In some embodiments of the invention, the alkyl group is a C₄ to C₃₀ alkyl. For example, the alkyl group can be any of a C4 alkyl, C6 alkyl, C8 alkyl, C10 alkyl, C12 alkyl, C14 alkyl, C16 alkyl, C18 alkyl, C20 alkyl, C22 alkyl, C24 alkyl, C26 alkyl, C28 alkyl, or a C30 alkyl. In some embodiments, the alkyl group is a C8 to C20 alkyl, e.g., a C14 alkyl or a C16 alkyl.

[0245] In some specific embodiments, the alkyl group comprises a steroid moiety of a bile acid, e.g., cholic acid, chenodeoxycholic acid, deoxycholic acid, lithocholic acid, taurocholic acid, glycocholic acid, and cholesterol acid.

[0246] In some embodiments of the invention, peptide Q is modified to comprise an alkyl group by reacting a nucleophilic, long chain alkane with Q, wherein Q comprises a leaving group suitable for nucleophilic substitution. In specific aspects, the nucleophilic group of the long chain alkane comprises an amine, hydroxyl, or thiol group (e.g. octadecylamine, tetradecanol, and hexadecanethiol). The leaving group of Q can be part of a side chain of an amino acid or can be part of the peptide backbone. Suitable leaving groups include, for example, N-hydroxysuccinimide, halogens, and sulfonate esters.

[0247] In certain embodiments, peptide Q is modified to comprise an alkyl group by reacting the nucleophilic, long chain alkane with a spacer, which is attached to Q, wherein the spacer comprises the leaving group. In specific aspects, the long chain alkane comprises an amine, hydroxyl, or thiol group. In certain embodiments, the spacer comprising the leaving group can be any spacer discussed herein, e.g., amino acids, dipeptides, tripeptides, hydrophilic bifunctional spacers and hydrophobic bifunctional spacers further comprising a suitable leaving group.

[0248] With regard to these aspects of the invention in which a long chain alkane is alkylated by peptide Q or the spacer, the long chain alkane may be of any size and can comprise any length of carbon chain. The long chain alkane can be linear or branched. In certain aspects, the long chain alkane is a C4 to C30 alkane. For example, the long chain alkane can be any of a C4 alkane, C6 alkane, C8 alkane, C10 alkane, C12 alkane, C14 alkane, C16 alkane, C18 alkane, C20 alkane, C22 alkane, C24 alkane, C26 alkane, C28 alkane, or a C30 alkane. In some embodiments in which the glucagon related peptide is a Class 1, Class 2, or Class 3 glucagon related peptide, the long chain alkane comprises a C8 to C20 alkane, e.g., a C14 alkane, C16 alkane, or a C18 alkane.

[0249] Also, in some embodiments alkylation can occur between Q and a cholesterol moiety. For example, the hydroxyl group of cholesterol can displace a leaving group on the long chain alkane to form a cholesterol-glucagon peptide product.

[0250] The alkylated peptides (Q) described herein can be further modified to comprise a hydrophilic moiety. In some specific embodiments the hydrophilic moiety can comprise a polyethylene glycol (PEG) chain. The incorporation of a hydrophilic moiety can be accomplished through any suitable means, such as any of the methods described herein. In some embodiments related to Class 1, 2, 3, 4 or 5 glucagon related peptides the alkylated Q can comprise SEQ ID NO: 1601, or a modified amino acid sequence thereof comprising one or more of the amino acid modifications described herein, in which at least one of the amino acids at position 10, 20, 24, and 29 (according to the amino acid numbering of wild type glucagon) comprise an alkyl group and at least one of the amino acids at position 16, 17, 21, 24, and 29, a position within a C-terminal extension or the C-terminal amino acid are modified to a Cys, Lys, Orn, homo-Cys, or Ac-Phe, and the side chain of the amino acid is covalently bonded to a hydrophilic moiety (e.g., PEG). In some embodiments related to Class 1, 2, 3, 4 or 5 glucagon related peptides, the alkyl group is attached to position 10 (according to the amino acid numbering of wild type glucagon), optionally via a spacer comprising Cys, Lys, Orn, homo-Cys, or Ac-Phe, and the hydrophilic moiety is incorporated at a Cys residue at position 24.

[0251] Alternatively, the alkylated peptide Q can comprise a spacer, wherein the spacer is both alkylated and modified to comprise the hydrophilic moiety. Nonlimiting examples of suitable spacers include a spacer comprising one or more amino acids selected from the group consisting of Cys, Lys, Orn, homo-Cys, and Ac-Phe.

### Stabilization of the Alpha-Helix Structure

[0252] In some embodiments, an intramolecular bridge is formed between two amino acid side chains to stabilize the three dimensional structure of the carboxy terminal portion (e.g., amino acids 12-29 (according to the amino acid numbering of wild type glucagon)) of Class 1, 2, 3, 4, or 5 glucagon related peptide Q. The two amino acid side chains can be linked to one another through hydrogen-bonding, ionic interactions, such as the formation of salt bridges, or by covalent bonds.

[0253] In some embodiments, the intramolecular bridge is formed between two amino acids that are 3 amino acids apart, e.g., amino acids at positions i and i+4, wherein i is any integer between 12 and 25 (e.g., 12, 13, 14, 15, 16, 17, 18, 19, 20, 21, 22, 23, 24, and 25) according to the amino acid numbering of wild type glucagon. More particularly, the side chains of the amino acid pairs 12 and 16, 16 and 20, 20 and 24 or 24 and 28 (amino acid pairs in which i=12, 16, 20, or 24) according to the amino acid numbering of wild type glucagon are linked to one another and thus stabilize the glucagon alpha helix. Alternatively, i can be 17.

[0254] In some specific embodiments, wherein the amino acids at positions i and i+4 are joined by an intramolecular bridge, the size of the linker is about 8 atoms, or about 7-9 atoms.

[0255] In other embodiments, the intramolecular bridge is formed between two amino acids that are two amino acids apart, e.g., amino acids at positions j and j+3, wherein j is any integer between 12 and 26 (e.g., 12, 13, 14, 15, 16, 17, 18, 19, 20, 21, 22, 23, 24, 25, and 26) according to the amino acid numbering of wild type glucagon. In some specific embodiments, j is 17.

[0256] In some specific embodiments, wherein amino acids at positions j and j+3 are joined by an intramolecular bridge, the size of the linker is about 6 atoms, or about 5 to 7 atoms.

[0257] In yet other embodiments, the intramolecular bridge is formed between two amino acids that are 6 amino acids apart, e.g., amino acids at positions k and k+7, wherein k is any integer between 12 and 22 (e.g., 12, 13, 14, 15, 16, 17, 18, 19, 20, 21, and 22) according to the amino acid numbering of wild type glucagon. In some specific embodiments, k is 12, 13, or 17. In an exemplary embodiment, k is 17.

[0258] Examples of amino acid pairings that are capable of covalently bonding to form a six-atom linking bridge include Orn and Asp, Glu and an amino acid of Formula I, wherein n is 2, and homoglutamic acid and an amino acid of Formula I, wherein n is 1, wherein Formula I is:

[chemical structure]

[0259] Examples of amino acid pairing that are capable of covalently bonding to form a seven-atom linking bridge include Orn-Glu (lactam ring); Lys-Asp (lactam); or Homoser-Homoglu (lactone). Examples of amino acid pairings that may form an eight-atom linker include Lys-Glu (lactam); Homolys-Asp (lactam); Orn-Homoglu (lactam); 4-aminoPhe-Asp (lactam); or Tyr-Asp (lactone). Examples of amino acid pairings that may form a nine-atom linker include Homolys-Glu (lactam); Lys-Homoglu (lactam); 4-aminoPhe-Glu (lactam); or Tyr-Glu (lactone). Any of the side chains on these amino acids may additionally be substituted with additional chemical groups, so long as the three-dimensional structure of the alpha-helix is not disrupted. One of ordinary skill in the art can envision alternative pairings or alternative amino acid analogs, including chemically modified derivatives that would create a stabilizing structure of similar size and desired effect. For example, a homocysteine-homocysteine disulfide bridge is 6 atoms in length and may be further modified to provide the desired effect. Even without covalent linkage, the amino acid pairings described above or similar pairings that one of ordinary skill in the art can envision may also provide added stability to the alpha-helix through non-covalent bonds, for example, through formation of salt bridges or hydrogen-bonding interactions.

[0260] The size of a lactam ring can vary depending on the length of the amino acid side chains, and in some embodiments the lactam is formed by linking the side chains of a lysine amino acid to a glutamic acid side chain. Further exemplary embodiments (according to the amino acid numbering of wild type glucagon) include the following pairings, optionally with a lactam bridge: Glu at position 12 with Lys at position 16; native Lys at position 12 with Glu at position 16; Glu at position 16 with Lys at position 20; Lys at position 16 with Glu at position 20; Glu at position 20 with Lys at position 24; Lys at position 20 with Glu at position 24; Glu at position 24 with Lys at position 28; Lys at position 24 with Glu at position 28. Alternatively, the order of the amide bond in the lactam ring can be reversed (e.g., a lactam ring can be formed between the side chains of a Lys12 and a Glu16 or alternatively between a Glu 12 and a Lys16).

[0261] Intramolecular bridges other than a lactam bridge can be used to stabilize the alpha helix of Q. In some embodiments, the intramolecular bridge is a hydrophobic bridge. In this instance, the intramolecular bridge optionally is between the side chains of two amino acids that are part of the hydrophobic face of the alpha helix of Q. For example, one of the amino acids joined by the hydrophobic bridge can be the amino acid at position 10, 14, and 18 (according to the amino acid numbering of wild type glucagon).

[0262] In one specific aspect, olefin metathesis is used to cross-link one or two turns of the alpha helix of Q using an all-hydrocarbon cross-linking system. Q in this instance can comprise α-methylated amino acids bearing olefinic side chains of varying length and configured with either R or S stereochemistry at the i and i+4 or i+7 positions. For example, the olefinic side can comprise (CH₂)ₙ, wherein n is any integer between 1 to 6. In some embodiments, n is 3 for a cross-link length of 8 atoms. Suitable methods of forming such intramolecular bridges are described in the art. See, for example, Schafineister et al., J. Am. Chem. Soc. 122: 5891-5892 (2000) and Walensky et al., Science 305: 1466-1470 (2004). Alternatively, Q can comprise O-allyl Ser residues located on adjacent helical turns, which are bridged together via ruthenium-catalyzed ring closing metathesis. Such procedures of cross-linking are described in, for example, Blackwell et al., Angew, Chem., Int. Ed. 37: 3281-3284 (1998).

[0263] In another specific aspect, use of the unnatural thio-dialanine amino acid, lanthionine, which has been widely adopted as a peptidomimetic of cystine, is used to cross-link one turn of the alpha helix. Suitable methods of lanthionine-based cyclization are known in the art. See, for instance, Matteucci et al., Tetrahedron Letters 45: 1399-1401 (2004); Mayer et al., J. Peptide Res. 51: 432-436 (1998); Polinsky et al., J. Med. Chem. 35: 4185-4194 (1992); Osapay et al., J. Med. Chem. 40: 2241-2251 (1997); Fukase et al., Bull. Chem. Soc. Jpn. 65: 2227-2240 (1992); Harpp et al., J. Org. Chem. 36: 73-80 (1971); Goodman and Shao, Pure Appl. Chem. 68: 1303-1308 (1996); and Osapay and Goodman, J. Chem. Soc. Chem. Commun. 1599-1600 (1993).

[0264] In some embodiments, α,ω-diaminoalkane tethers, e.g., 1,4-diaminopropane and 1,5-diaminopentane) between two Glu residues at positions i and i+7 are used to stabilize the alpha helix of Q. Such tethers lead to the formation of a bridge of 9-atoms or more in length, depending on the length of the diaminoalkane tether. Suitable methods of producing peptides cross-linked with such tethers are described in the art. See, for example, Phelan et al., J. Am. Chem. Soc. 119: 455-460 (1997).

[0265] In yet another embodiment of the invention, a disulfide bridge is used to cross-link one or two turns of the alpha helix of Q. Alternatively, a modified disulfide bridge in which one or both sulfur atoms are replaced by a methylene group resulting in an isosteric macrocyclization is used to stabilize the alpha helix of Q. Suitable methods of modifying peptides with disulfide bridges or sulfur-based cyclization are described in, for example, Jackson et al., J. Am. Chem. Soc. 113: 9391-9392 (1991) and Rudinger and Jost, Experientia 20: 570-571 (1964).

[0266] In yet another embodiment, the alpha helix of Q is stabilized via the binding of metal atom by two His residues or a His and Cys pair positioned at i and i+4. The metal atom can be, for example, Ru(III), Cu(II), Zn(II), or Cd(II). Such methods of metal binding-based alpha helix stabilization are known in the art. See, for example, Andrews and Tabor, Tetrahedron 55: 11711-11743 (1999); Ghadiri et al., J. Am. Chem. Soc. 112: 1630-1632 (1990); and Ghadiri et al., J. Am. Chem. Soc. 119: 9063-9064 (1997).

[0267] The alpha helix of Q can alternatively be stabilized through other means of peptide cyclizing, which means are reviewed in Davies, J. Peptide. Sci. 9: 471-501 (2003). The alpha helix can be stabilized via the formation of an amide bridge, thioether bridge, thioester bridge, urea bridge, carbamate bridge, sulfonamide bridge, and the like. For example, a thioester bridge can be formed between the C-terminus and the side chain of a Cys residue. Alternatively, a thioester can be formed via side chains of amino acids having a thiol (Cys) and a carboxylic acid (e.g., Asp, Glu). In another method, a cross-linking agent, such as a dicarboxylic acid, e.g. suberic acid (octanedioic acid), etc. can introduce a link between two functional groups of an amino acid side chain, such as a free amino, hydroxyl, thiol group, and combinations thereof.

[0268] In accordance with some embodiments, the alpha helix of Q is stabilized through the incorporation of hydrophobic amino acids at positions i and i+4. For instance, i can be Tyr and i+4 can be either Val or Leu; i can be Phe and i+4 can be Cys or Met; I can be Cys and i+4 can be Met; or i can be Phe and i+4 can be Ile. It should be understood that, for purposes herein, the above amino acid pairings can be reversed, such that the indicated amino acid at position i could alternatively be located at i+4, while the i+4 amino acid can be located at the i position.

[0269] In accordance with other embodiments of the invention, wherein Q is a glucagon related peptide, the alpha helix is stabilized through incorporation (either by amino acid substitution or insertion) of one or more alpha helix-stabilizing amino acids at the C-terminal portion of Q (around amino acids 12-29 according to the numbering of the amino acid numbering of wild type glucagon). In a specific embodiment, the alpha helix-stabilizing amino acid is an α,α-disubstituted amino acid, including, but not limited to any of amino iso-butyric acid (Aib), an amino acid disubstituted with the same or a different group selected from methyl, ethyl, propyl, and n-butyl, or with a cyclooctane or cycloheptane (e.g., 1-aminocyclooctane-1-carboxylic acid). In some embodiments, one, two, three, four or more of positions 16, 17, 18, 19, 20, 21, 24 or 29 of the glucagon related peptide is substituted with an α,α-disubstituted amino acid. In a specific embodiment, one, two, three or all of positions 16, 20, 21, and 24 are substituted with Aib.

### Conjugates

[0270] In some embodiments, the peptides (Q) described herein are glycosylated, amidated, carboxylated, phosphorylated, esterified, N-acylated, cyclized via, e.g., a disulfide bridge, or converted into a salt (e.g., an acid addition salt, a basic addition salt), and/or optionally dimerized, multimerized, or polymerized, or conjugated. As described herein, Q can be a glucagon superfamily peptide, glucagon related peptide, including a Class 1, 2, 3, 4 or 5 glucagon related peptide, or osteocalcin, calcitonin, amylin, or an analog, derivative or conjugate thereof.

[0271] The present disclosure also encompasses conjugates in which Q of Q-L-Y is further linked to a heterologous moiety. The conjugation between Q and the heterologous moiety can be through covalent bonding, non-covalent bonding (e.g. electrostatic interactions, hydrogen bonds, van der Waals interactions, salt bridges, hydrophobic interactions, and the like), or both types of bonding. A variety of non-covalent coupling systems may be used, including biotin-avidin, ligand/receptor, enzyme/substrate, nucleic acid/nucleic acid binding protein, lipid/lipid binding protein, cellular adhesion molecule partners; or any binding partners or fragments thereof which have affinity for each other. In some aspects, the covalent bonds are peptide bonds. The conjugation of Q to the heterologous moiety may be indirect or direct conjugation, the former of which may involve a linker or spacer. Suitable linkers and spacers are known in the art and include, but not limited to, any of the linkers or spacers described herein under the sections “Acylation and alkylation” and “The Linking Group,” and in the subsection “Chemical Modification of Q and/or L.”

[0272] As used herein, the term “heterologous moiety” is synonymous with the term “conjugate moiety” and refers to any molecule (chemical or biochemical, naturally-occurring or non-coded) which is different from Q to which it is attached. Exemplary conjugate moieties that can be linked to Q include but are not limited to a heterologous peptide or polypeptide (including for example, a plasma protein), a targeting agent, an immunoglobulin or portion thereof (e.g., variable region, CDR, or Fc region), a diagnostic label such as a radioisotope, fluorophore or enzymatic label, a polymer including water soluble polymers, or other therapeutic or diagnostic agents. In some embodiments a conjugate is provided comprising Q and a plasma protein, wherein the plasma protein is selected from the group consisting of albumin, transferin, fibrinogen and globulins. In some embodiments the plasma protein moiety of the conjugate is albumin or transferin. The conjugate in some embodiments comprises Q and one or more of a polypeptide, a nucleic acid molecule, an antibody or fragment thereof, a polymer, a quantum dot, a small molecule, a toxin, a diagnostic agent, a carbohydrate, an amino acid.

[0273] C-Terminal Heterologous Moiety

[0274] In some embodiments, the heterologous moiety conjugated to Q is a peptide which is distinct from Q and the conjugate is a fusion peptide or a chimeric peptide. In some embodiments, where Q is a glucagon superfamily peptide, the heterologous moiety is a peptide extension of 1-21 amino acids. In specific embodiments, where Q is a glucagon related peptide (e.g. a Class 1, 2, 3, 4 or 5 glucagon related peptide), the extension is attached to the C-terminus of Q, e.g., to amino acid at position 29. In some embodiments, the extension comprises an amino acid sequence of SEQ ID NO: 1610 (GPSSGAPPPS), SEQ ID NO: 1611 (GGPSSGAPPPS-CONH₂), SEQ ID NO: 1614 (KRNRNNIA), SEQ ID NO: 1643 (KRNR), or KGKKNDWKHNITQ (SEQ ID NO: 1613). In specific aspects, the amino acid sequence is attached through the C-terminal amino acid of Q, e.g., amino acid at position 29. In some embodiments, the amino acid sequence of SEQ ID NOs: 1610, 1611, 1613, 1614 and 1643 is bound to amino acid 29 of the peptide through a peptide bond. In some specific embodiments, the amino acid at position 29 of the glucagon related peptide (e.g. a Class 1, 2, 3, 4 or 5 glucagon related peptide) is a Gly and the Gly is fused to one of the amino acid sequences of SEQ ID NOs: 1610, 1611, 1613, 1614 and 1643.

[0275] Polymer Heterologous Moiety

[0276] In some embodiments, the heterologous moiety conjugated to Q is a polymer. In some embodiments, the polymer is selected from the group consisting of: polyamides, polycarbonates, polyalkylenes and derivatives thereof including, polyalkylene glycols, polyalkylene oxides, polyalkylene terepthalates, polymers of acrylic and methacrylic esters, including poly(methyl methacrylate), poly(ethyl methacrylate), poly(butylmethacrylate), poly(isobutyl methacrylate), poly(hexylmethacrylate), poly(isodecyl methacrylate), poly(lauryl methacrylate), poly(phenyl methacrylate), poly(methyl acrylate), poly(isopropyl acrylate), poly(isobutyl acrylate), and poly(octadecyl acrylate), polyvinyl polymers including polyvinyl alcohols, polyvinyl ethers, polyvinyl esters, polyvinyl halides, poly(vinyl acetate), and polyvinylpyrrolidone, polyglycolides, polysiloxanes, polyurethanes and co-polymers thereof, celluloses including alkyl cellulose, hydroxyalkyl celluloses, cellulose ethers, cellulose esters, nitro celluloses, methyl cellulose, ethyl cellulose, hydroxypropyl cellulose, hydroxy-propyl methyl cellulose, hydroxybutyl methyl cellulose, cellulose acetate, cellulose propionate, cellulose acetate butyrate, cellulose acetate phthalate, carboxylethyl cellulose, cellulose triacetate, and cellulose sulphate sodium salt, polypropylene, polyethylenes including poly(ethylene glycol), poly(ethylene oxide), and poly(ethylene terephthalate), and polystyrene.

[0277] In some aspects, the polymer is a biodegradable polymer, including a synthetic biodegradable polymer (e.g., polymers of lactic acid and glycolic acid, polyanhydrides, poly(ortho)esters, polyurethanes, poly(butic acid), poly(valeric acid), and poly(lactide-cocaprolactone)), and a natural biodegradable polymer (e.g., alginate and other polysaccharides including dextran and cellulose, collagen, chemical derivatives thereof (substitutions, additions of chemical groups, for example, alkyl, alkylene, hydroxylations, oxidations, and other modifications routinely made by those skilled in the art), albumin and other hydrophilic proteins (e.g., zein and other prolamines and hydrophobic proteins)), as well as any copolymer or mixture thereof. In general, these materials degrade either by enzymatic hydrolysis or exposure to water in vivo, by surface or bulk erosion.

[0278] In some aspects, the polymer is a bioadhesive polymer, such as a bioerodible hydrogel described by H. S. Sawhney, C. P. Pathak and J. A. Hubbell in Macromolecules, 1993, 26, 581-587, the teachings of which are incorporated herein, polyhyaluronic acids, casein, gelatin, glutin, polyanhydrides, polyacrylic acid, alginate, chitosan, poly(methyl methacrylates), poly(ethyl methacrylates), poly(butylmethacrylate), poly(isobutyl methacrylate), poly(hexylmethacrylate), poly(isodecyl methacrylate), poly(lauryl methacrylate), poly(phenyl methacrylate), poly(methyl acrylate), poly(isopropyl acrylate), poly(isobutyl acrylate), and poly(octadecyl acrylate).

[0279] In some embodiments, the polymer is a water-soluble polymer or a hydrophilic polymer. Hydrophilic polymers are further described herein under “Hydrophilic Heterologous Moieties.” Suitable water-soluble polymers are known in the art and include, for example, polyvinylpyrrolidone, hydroxypropyl cellulose (HPC; Klucel), hydroxypropyl methylcellulose (HPMC; Methocel), nitrocellulose, hydroxypropyl ethylcellulose, hydroxypropyl butylcellulose, hydroxypropyl pentylcellulose, methyl cellulose, ethylcellulose (Ethocel), hydroxyethyl cellulose, various alkyl celluloses and hydroxyalkyl celluloses, various cellulose ethers, cellulose acetate, carboxymethyl cellulose, sodium carboxymethyl cellulose, calcium carboxymethyl cellulose, vinyl acetate/crotonic acid copolymers, poly-hydroxyalkyl methacrylate, hydroxymethyl methacrylate, methacrylic acid copolymers, polymethacrylic acid, polymethylmethacrylate, maleic anhydride/methyl vinyl ether copolymers, poly vinyl alcohol, sodium and calcium polyacrylic acid, polyacrylic acid, acidic carboxy polymers, carboxypolymethylene, carboxyvinyl polymers, polyoxyethylene polyoxypropylene copolymer, polymethylvinylether co-maleic anhydride, carboxymethylamide, potassium methacrylate divinylbenzene co-polymer, polyoxyethyleneglycols, polyethylene oxide, and derivatives, salts, and combinations thereof.

[0280] In specific embodiments, the polymer is a polyalkylene glycol, including, for example, polyethylene glycol (PEG).

[0281] In some embodiments, the heterologous moiety is a carbohydrate. In some embodiments, the carbohydrate is a monosaccharide (e.g., glucose, galactose, fructose), a disaccharide (e.g., sucrose, lactose, maltose), an oligosaccharide (e.g., raffinose, stachyose), a polysaccharide (a starch, amylase, amylopectin, cellulose, chitin, callose, laminarin, xylan, mannan, fucoidan, galactomannan.

[0282] In some embodiments, the heterologous moiety is a lipid. The lipid, in some embodiments, is a fatty acid, eicosanoid, prostaglandin, leukotriene, thromboxane, N-acyl ethanolamine), glycerolipid (e.g., mono-, di-, tri-substituted glycerols), glycerophospholipid (e.g., phosphatidylcholine, phosphatidylinositol, phosphatidylethanolamine, phosphatidylserine), sphingolipid (e.g., sphingosine, ceramide), sterol lipid (e.g., steroid, cholesterol), prenol lipid, saccharolipid, or a polyketide, oil, wax, cholesterol, sterol, fat-soluble vitamin, monoglyceride, diglyceride, triglyceride, a phospholipid.

[0283] Fc Fusion Heterologous Moiety

[0284] As noted above, in some embodiments Q is conjugated, e.g., fused to an immunoglobulin or portion thereof (e.g. variable region, CDR, or Fc region). As described herein, Q can be a glucagon superfamily peptide, glucagon related peptide, including a Class 1, 2, 3, 4 or 5 glucagon related peptide, or osteocalcin, calcitonin, amylin, or an analog, derivative or conjugate thereof. Known types of immunoglobulins (Ig) include IgG, IgA, IgE, IgD or IgM. The Fc region is a C-terminal region of an Ig heavy chain, which is responsible for binding to Fc receptors that carry out activities such as recycling (which results in prolonged half-life), antibody dependent cell-mediated cytotoxicity (ADCC), and complement dependent cytotoxicity (CDC).

[0285] For example, according to some definitions the human IgG heavy chain Fc region stretches from Cys226 to the C-terminus of the heavy chain. The “hinge region” generally extends from Glu216 to Pro230 of human IgG1 (hinge regions of other IgG isotypes may be aligned with the IgG1 sequence by aligning the cysteines involved in cysteine bonding). The Fc region of an IgG includes two constant domains, CH2 and CH3. The CH2 domain of a human IgG Fc region usually extends from amino acids 231 to amino acid 341. The CH3 domain of a human IgG Fc region usually extends from amino acids 342 to 447. References made to amino acid numbering of immunoglobulins or immunoglobulin fragments, or regions, are all based on Kabat et al. 1991, Sequences of Proteins of Immunological Interest, U.S. Department of Public Health, Bethesda, Md. In a related embodiment, the Fc region may comprise one or more native or modified constant regions from an immunoglobulin heavy chain, other than CH1, for example, the CH2 and CH3 regions of IgG and IgA, or the CH3 and CH4 regions of IgE.

[0286] Suitable conjugate moieties include portions of immunoglobulin sequence that include the FcRn binding site. FcRn, a salvage receptor, is responsible for recycling immunoglobulins and returning them to circulation in blood. The region of the Fc portion of IgG that binds to the FcRn receptor has been described based on X-ray crystallography (Burmeister et al. 1994, Nature 372:379). The major contact area of the Fc with the FcRn is near the junction of the CH2 and CH3 domains. Fc-FcRn contacts are all within a single Ig heavy chain. The major contact sites include amino acid residues 248, 250-257, 272, 285, 288, 290-291, 308-311, and 314 of the CH2 domain and amino acid residues 385-387, 428, and 433-436 of the CH3 domain.

[0287] Some conjugate moieties may or may not include FcγR binding site(s). FcγR are responsible for ADCC and CDC. Examples of positions within the Fc region that make a direct contact with FcγR are amino acids 234-239 (lower hinge region), amino acids 265-269 (B/C loop), amino acids 297-299 (C′/E loop), and amino acids 327-332 (F/G) loop (Sondermann et al., Nature 406: 267-273, 2000). The lower hinge region of IgE has also been implicated in the FcRI binding (Henry, et al., Biochemistry 36, 15568-15578, 1997). Residues involved in IgA receptor binding are described in Lewis et al., (J. Immunol. 175:6694-701, 2005) Amino acid residues involved in IgE receptor binding are described in Sayers et al. (J Biol. Chem. 279(34):35320-5, 2004).

[0288] Amino acid modifications may be made to the Fc region of an immunoglobulin. Such variant Fc regions comprise at least one amino acid modification in the CH3 domain of the Fc region (residues 342-447) and/or at least one amino acid modification in the CH2 domain of the Fc region (residues 231-341). Mutations believed to impart an increased affinity for FcRn include T256A, T307A, E380A, and N434A (Shields et al. 2001, J. Biol. Chem. 276:6591). Other mutations may reduce binding of the Fc region to FcγRI, FcγRIIA, FcγRIIB, and/or FcγRIIIA without significantly reducing affinity for FcRn. For example, substitution of the Asn at position 297 of the Fc region with Ala or another amino acid removes a highly conserved N-glycosylation site and may result in reduced immunogenicity with concomitant prolonged half-life of the Fc region, as well as reduced binding to FcγRs (Routledge et al. 1995, Transplantation 60:847; Friend et al. 1999, Transplantation 68:1632; Shields et al. 1995, J. Biol. Chem. 276:6591) Amino acid modifications at positions 233-236 of IgG1 have been made that reduce binding to FcγRs (Ward and Ghetie 1995, Therapeutic Immunology 2:77 and Armour et al. 1999, Eur. J. Immunol. 29:2613). Some exemplary amino acid substitutions are described in U.S. Pat. Nos. 7,355,008 and 7,381,408, each incorporated by reference herein in its entirety.

[0289] Hydrophilic Heterologous Moiety

[0290] In some embodiments, Q described herein is covalently bonded to a hydrophilic moiety. As described herein, Q can be a glucagon superfamily peptide, glucagon related peptide, including a Class 1, 2, 3, 4 or 5 glucagon related peptide, or osteocalcin, calcitonin, amylin, or an analog, derivative or conjugate thereof. Hydrophilic moieties can be attached to Q under any suitable conditions used to react a protein with an activated polymer molecule. Any means known in the art can be used, including via acylation, reductive alkylation, Michael addition, thiol alkylation or other chemoselective conjugation/ligation methods through a reactive group on the PEG moiety (e.g., an aldehyde, amino, ester, thiol, α-haloacetyl, maleimido or hydrazino group) to a reactive group on the target compound (e.g., an aldehyde, amino, ester, thiol, α-haloacetyl, maleimido or hydrazino group). Activating groups which can be used to link the water soluble polymer to one or more proteins include without limitation sulfone, maleimide, sulfhydryl, thiol, triflate, tresylate, azidirine, oxirane, 5-pyridyl, and alpha-halogenated acyl group (e.g., alpha-iodo acetic acid, alpha-bromoacetic acid, alpha-chloroacetic acid). If attached to the peptide by reductive alkylation, the polymer selected should have a single reactive aldehyde so that the degree of polymerization is controlled. See, for example, Kinstler et al., Adv. Drug. Delivery Rev. 54: 477-485 (2002); Roberts et al., Adv. Drug Delivery Rev. 54: 459-476 (2002); and Zalipsky et al., Adv. Drug Delivery Rev. 16: 157-182 (1995).

[0291] Further activating groups which can be used to link the hydrophilic moiety (water soluble polymer) to a protein include an alpha-halogenated acyl group (e.g., alpha-iodo acetic acid, alpha-bromoacetic acid, alpha-chloroacetic acid). In specific aspects, an amino acid residue of the peptide having a thiol is modified with a hydrophilic moiety such as PEG. In some embodiments, an amino acid on Q comprising a thiol is modified with maleimide-activated PEG in a Michael addition reaction to result in a PEGylated peptide comprising the thioether linkage shown below:

[chemical structure]

[0292] In some embodiments, the thiol of an amino acid of Q is modified with a haloacetyl-activated PEG in a nucleophilic substitution reaction to result in a PEGylated peptide comprising the thioether linkage shown below:

[chemical structure]

[0293] Suitable hydrophilic moieties include polyethylene glycol (PEG), polypropylene glycol, polyoxyethylated polyols (e.g., POG), polyoxyethylated sorbitol, polyoxyethylated glucose, polyoxyethylated glycerol (POG), polyoxyalkylenes, polyethylene glycol propionaldehyde, copolymers of ethylene glycol/propylene glycol, monomethoxy-polyethylene glycol, mono-(C1-C10) alkoxy- or aryloxy-polyethylene glycol, carboxymethylcellulose, polyacetals, polyvinyl alcohol (PVA), polyvinyl pyrrolidone, poly-1,3-dioxolane, poly-1,3,6-trioxane, ethylene/maleic anhydride copolymer, poly (.beta-amino acids) (either homopolymers or random copolymers), poly(n-vinyl pyrrolidone)polyethylene glycol, propropylene glycol homopolymers (PPG) and other polyakylene oxides, polypropylene oxide/ethylene oxide copolymers, colonic acids or other polysaccharide polymers, Ficoll or dextran and mixtures thereof. Dextrans are polysaccharide polymers of glucose subunits, predominantly linked by α1-6 linkages. Dextran is available in many molecular weight ranges, e.g., about 1 kD to about 100 kD, or from about 5, 10, 15 or 20 kD to about 20, 30, 40, 50, 60, 70, 80 or 90 kD.

[0294] The hydrophilic moiety, e.g., polyethylene glycol chain, in accordance with some embodiments has a molecular weight selected from the range of about 500 to about 40,000 Daltons. In some embodiments the polyethylene glycol chain has a molecular weight selected from the range of about 500 to about 5,000 Daltons, or about 1,000 to about 5,000 Daltons. In another embodiment the hydrophilic moiety, e.g., polyethylene glycol chain, has a molecular weight of about 10,000 to about 20,000 Daltons. In yet other exemplary embodiments the hydrophilic moiety, e.g. polyethylene glycol chain, has a molecular weight of about 20,000 to about 40,000 Daltons.

[0295] Linear or branched hydrophilic polymers are contemplated. Resulting preparations of conjugates may be essentially monodisperse or polydisperse, and may have about 0.5, 0.7, 1, 1.2, 1.5 or 2 polymer moieties per peptide.

[0296] In some embodiments, the native amino acid of the peptide is substituted with an amino acid having a side chain suitable for crosslinking with hydrophilic moieties, to facilitate linkage of the hydrophilic moiety to the peptide. Exemplary amino acids include Cys, Lys, Orn, homo-Cys, or acetyl phenylalanine (Ac-Phe). In other embodiments, an amino acid modified to comprise a hydrophilic group is added to the peptide at the C-terminus

[0297] In some embodiments, the peptide of the conjugate is conjugated to a hydrophilic moiety, e.g. PEG, via covalent linkage between a side chain of an amino acid of the peptide and the hydrophilic moiety. In some embodiments, where Q is a Class 1, 2, 3, 4 or 5 glucagon-related peptide, the peptide is conjugated to a hydrophilic moiety via the side chain of an amino acid at position 16, 17, 21, 24, 29, 40, a position within a C-terminal extension, or the C-terminal amino acid, or a combination of these positions. In some aspects, the amino acid covalently linked to a hydrophilic moiety (e.g., the amino acid comprising a hydrophilic moiety) is a Cys, Lys, Orn, homo-Cys, or Ac-Phe, and the side chain of the amino acid is covalently bonded to a hydrophilic moiety (e.g., PEG).

[0298] rPEG Heterologous Moiety

[0299] In some embodiments, the conjugate of the invention comprises a Q fused to an accessory peptide which is capable of forming an extended conformation similar to chemical PEG (e.g., a recombinant PEG (rPEG) molecule), such as those described in International Patent Application Publication No. WO2009/023270 and U.S. Patent Application Publication No. US2008/0286808. The rPEG molecule is not polyethylene glycol. The rPEG molecule in some aspects is a polypeptide comprising one or more of glycine, serine, glutamic acid, aspartic acid, alanine, or proline. In some aspects, the rPEG is a homopolymer, e.g., poly-glycine, poly-serine, poly-glutamic acid, poly-aspartic acid, poly-alanine, or poly-proline. In other embodiments, the rPEG comprises two types of amino acids repeated, e.g., poly(Gly-Ser), poly(Gly-Glu), poly(Gly-Ala), poly(Gly-Asp), poly(Gly-Pro), poly(Ser-Glu), etc. In some aspects, the rPEG comprises three different types of amino acids, e.g., poly(Gly-Ser-Glu). In specific aspects, the rPEG increases the half-life of Q. In some aspects, the rPEG comprises a net positive or net negative charge. The rPEG in some aspects lacks secondary structure. In some embodiments, the rPEG is greater than or equal to 10 amino acids in length and in some embodiments is about 40 to about 50 amino acids in length. The accessory peptide in some aspects is fused to the N- or C-terminus of the peptide of the invention through a peptide bond or a proteinase cleavage site, or is inserted into the loops of the peptide of the invention. The rPEG in some aspects comprises an affinity tag or is linked to a PEG that is greater than 5 kDa. In some embodiments, the rPEG confers the conjugate of the invention with an increased hydrodynamic radius, serum half-life, protease resistance, or solubility and in some aspects confers the conjugate with decreased immunogenicity.

[0300] Q can be linked to conjugate moieties via direct covalent linkage by reacting targeted amino acid residues of the peptide with an organic derivatizing agent that is capable of reacting with selected side chains or the N- or C-terminal residues of these targeted amino acids. Reactive groups on the peptide or conjugate moiety include, e.g., an aldehyde, amino, ester, thiol, α-haloacetyl, maleimido or hydrazino group. Derivatizing agents include, for example, maleimidobenzoyl sulfosuccinimide ester (conjugation through cysteine residues), N-hydroxysuccinimide (through lysine residues), glutaraldehyde, succinic anhydride or other agents known in the art. Alternatively, the conjugate moieties can be linked to the peptide indirectly through intermediate carriers, such as polysaccharide or polypeptide carriers. Examples of polysaccharide carriers include aminodextran. Examples of suitable polypeptide carriers include polylysine, polyglutamic acid, polyaspartic acid, co-polymers thereof, and mixed polymers of these amino acids and others, e.g., serines, to confer desirable solubility properties on the resultant loaded carrier.

### Multimers

[0301] With regard to the Class 1, Class 2, and Class 3 glucagon related peptides, Q may be part of a dimer, trimer or higher order multimer comprising at least two, three, or more peptides bound via a linker, wherein at least one or both peptides is a glucagon related peptide. The dimer may be a homodimer or heterodimer. In some embodiments, the linker is selected from the group consisting of a bifunctional thiol crosslinker and a bi-functional amine crosslinker. In certain embodiments, the linker is PEG, e.g., a 5 kDa PEG, 20 kDa PEG. In some embodiments, the linker is a disulfide bond. For example, each monomer of the dimer may comprise a Cys residue (e.g., a terminal or internally positioned Cys) and the sulfur atom of each Cys residue participates in the formation of the disulfide bond. In some aspects of the invention, the monomers are connected via terminal amino acids (e.g., N-terminal or C-terminal), via internal amino acids, or via a terminal amino acid of at least one monomer and an internal amino acid of at least one other monomer. In specific aspects, the monomers are not connected via an N-terminal amino acid. In some aspects, the monomers of the multimer are attached together in a “tail-to-tail” orientation in which the C-terminal amino acids of each monomer are attached together. A conjugate moiety may be covalently linked to any of the glucagon related peptides described herein, including a dimer, trimer or higher order multimer.

### Conjugation of the Heterologous Moiety to Q

[0302] The heterologous moiety is conjugated to peptide (Q) according to linkage and conjugation methods described in the “Linking Group” section and “Chemical Modification of Q and/or Y subsection.”

### Methods for Making Q

[0303] The peptides (Q) disclosed herein may be prepared by standard synthetic methods, recombinant DNA techniques, or any other methods of preparing peptides and fusion proteins. Although certain non-natural amino acids cannot be expressed by standard recombinant DNA techniques, techniques for their preparation are known in the art. Compounds of this invention that encompass non-peptide portions may be synthesized by standard organic chemistry reactions, in addition to standard peptide chemistry reactions when applicable.

[0304] The peptides of the disclosure can be obtained by methods known in the art. Suitable methods of de novo synthesizing peptides are described in, for example, Chan et al., Fmoc Solid Phase Peptide Synthesis, Oxford University Press, Oxford, United Kingdom, 2005; Peptide and Protein Drug Analysis, ed. Reid, R., Marcel Dekker, Inc., 2000; Epitope Mapping, ed. Westwood et al., Oxford University Press, Oxford, United Kingdom, 2000; and U.S. Pat. No. 5,449,752.

[0305] Also, in the instances in which the peptides of the disclosure do not comprise any non-coded or non-natural amino acids, the peptide can be recombinantly produced using a nucleic acid encoding the amino acid sequence of the peptide using standard recombinant methods. See, for instance, Sambrook et al., Molecular Cloning: A Laboratory Manual. 3rd ed., Cold Spring Harbor Press, Cold Spring Harbor, N.Y. 2001; and Ausubel et al., Current Protocols in Molecular Biology, Greene Publishing Associates and John Wiley & Sons, NY, 1994.

[0306] In some embodiments, the peptides of the disclosure are isolated. In some embodiments, the peptides of the disclosure are purified. It is recognized that “purity” is a relative term, and not to be necessarily construed as absolute purity or absolute enrichment or absolute selection. In some aspects, the purity is at least or about 50%, is at least or about 60%, at least or about 70%, at least or about 80%, or at least or about 90% (e.g., at least or about 91%, at least or about 92%, at least or about 93%, at least or about 94%, at least or about 95%, at least or about 96%, at least or about 97%, at least or about 98%, at least or about 99% or is approximately 100%.

[0307] In some embodiments, the peptides described herein are commercially synthesized by companies, such as Synpep (Dublin, Calif.), Peptide Technologies Corp. (Gaithersburg, Md.), and Multiple Peptide Systems (San Diego, Calif.). In this respect, the peptides can be synthetic, recombinant, isolated, and/or purified.

[0308] Classes of glucagon related peptides (Q) are described in detail below. With respect to each of the sections of disclosure concerning Class 1, Class 2, Class 3, Class 4, and Class 5 glucagon related peptides, modifications are described with respect to the glucagon related peptide portion (Q) of a Q-L-Y conjugate detailed above. Thus, structural elements described with regard to a class of glucagon related peptides are structural elements of Q which is then further modified to generate the Q-L-Y conjugate as described above.

### Class 1 Glucagon Related Peptides

[0309] In certain embodiments, the glucagon related peptide is a Class 1 glucagon related peptide, which is described herein and in International Patent Publication No. WO 2009/155257 (published on Dec. 23, 2009), International Patent Application Publication No. WO 2008/086086 (published on Jul. 17, 2008), and International Patent Application Publication No. WO 2007/056362 (published on May 18, 2007), the contents of which are incorporated by reference in their entirety.

[0310] The biological sequences referenced in the following section (SEQ ID NOs: 801-915) relating to Class 1 glucagon related peptides correspond to SEQ ID NOs: 1-115 in International International Patent Publication No. WO 2009/155257.

### Activity

[0311] Class 1 glucagon peptides retain glucagon receptor activity relative to the native glucagon peptide (SEQ ID NO: 801). For example, the glucagon peptide can retain at least 10%, 20%, 30%, 40%, 50%, 60%, 70%, 75% activity, 80% activity, 85% activity, or 90% of the activity of native glucagon (calculated as the inverse ratio of EC₅₀s for the glucagon peptide vs. glucagon, e.g., as measured by cAMP production using the assay generally described in Example 2). In some embodiments, the Class 1 glucagon related peptides have the same or greater activity (used synonymously with the term “potency” herein) than glucagon. In some embodiments, the glucagon peptides described herein exhibit no more than about 100%, 1000%, 10,000%, 100,000%, or 1,000,000% of the activity of native glucagon peptide.

[0312] Any of the Class 1 glucagon related peptides described herein may exhibit an EC₅₀ at the human glucagon receptor of about 100 nM, 75 nM, 50 nM, 40 nM, 30 nM, 20 nM, 10 nM, 5 nM, 1 nM or less when tested for cAMP induction in HEK293 cells over-expressing glucagon receptor, e.g. using the assay of Example 2. Typically pegylated peptides will exhibit a higher EC₅₀ compared to the unpegylated peptide. For example, the Class 1 glucagon related peptides described herein, when unpegylated, may exhibit activity at the glucagon receptor which is at least 20% (e.g., at least 30%, at least 40%, at least 50%, at least 60%, at least 75%, at least 80%, at least 90% at least 95%, at least 98%, at least 99%, 100%, 150%, 200%, 400%, 500% or more) of the activity of native glucagon (SEQ ID NO: 801) at the glucagon receptor. In certain embodiments, the Class 1 glucagon related peptides described herein exhibit the indicated % activity of native glucagon at the glucagon receptor, when lacking a hydrophilic moiety, but exhibit a decreased % activity of native glucagon at the glucagon receptor, when comprising a hydrophilic moiety. For example, the Class 1 glucagon related peptides described herein, when pegylated, may exhibit activity at the glucagon receptor which is at least 2% (e.g. at least 3%, at least 4%, at least 5%, at least 6%, at least 7%, at least 8%, at least 9%, or at least 10% of the activity of native glucagon. In some embodiments, the Class 1 glucagon related peptides described herein may exhibit any of the above indicated activities but no more than 1000%, 10,000%, 100,000%, or 1,000,000% of the activity of native glucagon at the glucagon receptor.

[0313] In some embodiments, the Class 1 glucagon related peptides exhibit less than about 5%, 4%, 3%, 2% or 1% of the activity of native GLP-1 at the GLP-1 receptor and/or a greater than about 5-fold, 10-fold, or 15-fold selectivity for glucagon receptor compared to GLP-1 receptor. For example, in some embodiments, the Class 1 glucagon related peptides exhibit less than 5% of the activity of native GLP-1 at the GLP-1 receptor and exhibit a greater than 5-fold selectivity for glucagon receptor compared to GLP-1 receptor.

### Improved Solubility

[0314] Native glucagon exhibits poor solubility in aqueous solution, particularly at physiological pH, with a tendency to aggregate and precipitate over time. In contrast, the Class 1 glucagon related peptides in some embodiments exhibit at least 2-fold, 5-fold, or even higher solubility compared to native glucagon at a pH between 6 and 8, or between 6 and 9, for example, at pH 7 after 24 hours at 25° C.

[0315] Accordingly, in some embodiments, a Class 1 glucagon related peptide has been modified relative to the wild type peptide of His-Ser-Gln-Gly-Thr-Phe-Thr-Ser-Asp-Tyr-Ser-Lys-Tyr-Leu-Asp-Ser-Arg-Arg-Ala-Gln-Asp-Phe-Val-Gln-Trp-Leu-Met-Asn-Thr (SEQ ID NO: 801) to improve the peptides solubility in aqueous solutions, particularly at a pH ranging from about 5.5 to about 8.0, while retaining the native peptide's biological activity.

[0316] For example, the solubility of any of the Class 1 glucagon related peptides described herein can be further improved by attaching a hydrophilic moiety to the peptide. Introduction of such groups also increases duration of action, e.g. as measured by a prolonged half-life in circulation. Hydrophilic moieties are further described herein.

Modification with Charged Residues

[0317] In some embodiments, solubility is improved by adding charge to the Class 1 glucagon related peptide by the substitution of native non-charged amino acids with charged amino acids selected from the group consisting of lysine, arginine, histidine, aspartic acid and glutamic acid, or by the addition of charged amino acids to the amino or carboxy terminus of the peptide.

[0318] In accordance with some embodiments, the Class 1 glucagon related peptide has improved solubility due to the fact that the peptide is modified by amino acid substitutions and/or additions that introduce a charged amino acid into the C-terminal portion of the peptide, and in some embodiments at a position C-terminal to position 27 of SEQ ID NO: 801. Optionally, one, two or three charged amino acids may be introduced within the C-terminal portion, and in some embodiments C-terminal to position 27. In accordance with some embodiments, the native amino acid(s) at positions 28 and/or 29 are substituted with a charged amino acid, and/or one to three charged amino acids are added to the C-terminus of the peptide, e.g. after position 27, 28 or 29. In exemplary embodiments, one, two, three or all of the charged amino acids are negatively charged. In other embodiments, one, two, three or all of the charged amino acids are positively charged.

[0319] In specific exemplary embodiments, the Class 1 glucagon related peptide may comprise any one or two of the following modifications: substitution of N28 with E; substitution of N28 with D; substitution of T29 with D; substitution of T29 with E; insertion of E after position 27, 28 or 29; insertion of D after position 27, 28 or 29. For example, D28E29, E28E29, E29E30, E28E30, D28E30.

[0320] In accordance with one exemplary embodiment, the Class 1 glucagon related peptide comprises an amino acid sequence of SEQ ID NO: 811, or an analog thereof that contains 1 to 3 further amino acid modifications (described herein in reference to glucagon agonists) relative to native glucagon, or a glucagon agonist analog thereof. SEQ ID NO: 811 represents a modified Class 1 glucagon related peptide, wherein the asparagine residue at position 28 of the native protein has been substituted with an aspartic acid. In another exemplary embodiment the Class 1 glucagon related peptide comprises an amino acid sequence of SEQ ID NO: 838, wherein the asparagine residue at position 28 of the native protein has been substituted with glutamic acid. Other exemplary embodiments include Class 1 glucagon related peptides of SEQ ID NOs: 824, 825, 826, 833, 835, 836 and 837.

[0321] Substituting the normally occurring amino acid at position 28 and/or 29 with charged amino acids, and/or the addition of one to two charged amino acids at the carboxy terminus of the Class 1 glucagon related peptide, enhances the solubility and stability of the glucagon peptides in aqueous solutions at physiologically relevant pHs (i.e., a pH of about 6.5 to about 7.5) by at least 5-fold and by as much as 30-fold. Accordingly, Class 1 glucagon peptides of some embodiments retain glucagon activity and exhibit at least 2-fold, 5-fold, 10-fold, 15-fold, 25-fold, 30-fold or greater solubility relative to native glucagon at a given pH between about 5.5 and 8, e.g., pH 7, when measured after 24 hours at 25° C.

[0322] Additional modifications, e.g. conservative substitutions, which modifications are further described herein, may be made to the Class 1 glucagon related peptide that still allow it to retain glucagon activity.

### Improved Stability

[0323] Any of the Class 1 glucagon peptides may additionally exhibit improved stability and/or reduced degradation, for example, retaining at least 95% of the original peptide after 24 hours at 25° C. Any of the Class 1 glucagon related peptides disclosed herein may additionally exhibit improved stability at a pH within the range of 5.5 to 8, for example, retaining at least 75%, 80%, 90%, 95%, 96%, 97%, 98% or 99% of the original peptide after 24 hours at 25° C. In some embodiments, the Class 1 glucagon related peptides of the invention exhibit improved stability, such that at least 75% (e.g., at least 80%, at least 85%, at least 90%, at least 95%, more than 95%, up to 100%) of a concentration of the peptide or less than about 25% (e.g., less than 20%, less than 15%, less than 10%, less than 5%, 4%, 3%, 2%, 1%, down to 0%) of degraded peptide is detectable at 280 nm by an ultraviolet (UV) detector after about 1 or more weeks (e.g., about 2 weeks, about 4 weeks, about 1 month, about two months, about four months, about six months, about eight months, about ten months, about twelve months) in solution at a temperature of at least 20° C. (e.g., 21° C., 22° C., 23° C., 24° C., 25° C., 26° C., at least 27.5° C., at least 30° C., at least 35° C., at least 40° C., at least 50° C.) and less than 100° C., less than 85° C., less than 75° C., or less than 70° C. The Class 1 glucagon related peptides may include additional modifications that alter its pharmaceutical properties, e.g. increased potency, prolonged half-life in circulation, increased shelf-life, reduced precipitation or aggregation, and/or reduced degradation, e.g., reduced occurrence of cleavage or chemical modification after storage.

[0324] In yet further exemplary embodiments, any of the foregoing Class 1 glucagon related peptides can be further modified to improve stability by modifying the amino acid at position 15 of SEQ ID NO: 801 to reduce degradation of the peptide over time, especially in acidic or alkaline buffers. In exemplary embodiments, Asp at position 15 is substituted with a Glu, homo-Glu, cysteic acid, or homo-cysteic acid.

[0325] Alternatively, any of the Class 1 glucagon related peptides described herein can be further modified to improve stability by modifying the amino acid at position 16 of SEQ ID NO: 801. In exemplary embodiments, Ser at position 16 is substituted with Thr or Aib, or any of the amino acids substitutions described herein with regard to Class 1 glucagon related peptides which enhance potency at the glucagon receptor. Such modifications reduce cleavage of the peptide bond between Asp15-Ser16.

[0326] In some embodiments, any of the Class 1 glucagon related peptides described herein can be further modified to reduce degradation at various amino acid positions by modifying any one, two, three, or all four of positions 20, 21, 24, or 27. Exemplary embodiments include substitution of Gln at position 20 with Ser, Thr, Ala or Aib, substitution of Asp at position 21 with Glu, substitution of Gln at position 24 with Ala or Aib, substitution of Met at position 27 with Leu or Nle. Removal or substitution of methionine reduces degradation due to oxidation of the methionine. Removal or substitution of Gln or Asn reduces degradation due to deamidation of Gln or Asn. Removal or substitution of Asp reduces degradation that occurs through dehydration of Asp to form a cyclic succinimide intermediate followed by isomerization to iso-aspartate.

### Enhanced Potency

[0327] In accordance with another embodiment, Class 1 glucagon related peptides are provided that have enhanced potency at the glucagon receptor, wherein the peptides comprise an amino acid modification at position 16 of native glucagon (SEQ ID NO: 801). By way of nonlimiting example, such enhanced potency can be provided by substituting the naturally occurring serine at position 16 with glutamic acid or with another negatively charged amino acid having a side chain with a length of 4 atoms, or alternatively with any one of glutamine, homoglutamic acid, or homocysteic acid, or a charged amino acid having a side chain containing at least one heteroatom, (e.g. N, O, S, P) and with a side chain length of about 4 (or 3-5) atoms. Substitution of serine at position 16 with glutamic acid enhances glucagon activity at least 2-fold, 4-fold, 5-fold and up to 10-fold greater at the glucagon receptor. In some embodiments, the Class 1 glucagon related peptide retains selectivity for the glucagon receptor relative to the GLP-1 receptors, e.g., at least 5-fold, 10-fold, or 15-fold selectivity.

### DPP-IV Resistance

[0328] In some embodiments, the Class 1 glucagon peptides disclosed herein are further modified at position 1 or 2 to reduce susceptibility to cleavage by dipeptidyl peptidase IV. More particularly, in some embodiments, position 1 and/or position 2 of the Class 1 glucagon related peptide is substituted with the DPP-IV resistant amino acid(s) described herein. In some embodiments, position 2 of the analog peptide is substituted with an amino isobutyric acid. In some embodiments, position 2 of the analog peptide is substituted with an amino acid selected from the group consisting of D-serine, D-alanine, glycine, N-methyl serine, and ε-amino butyric acid. In another embodiment, position 2 of the Class 1 glucagon related peptide is substituted with an amino acid selected from the group consisting of D-serine, glycine, and aminoisobutyric acid. In some embodiments, the amino acid at position 2 is not D-serine.

[0329] Reduction in glucagon activity upon modification of the amino acids at position 1 and/or position 2 of the glucagon peptide can be restored by stabilization of the alpha-helix structure in the C-terminal portion of the glucagon peptide (around amino acids 12-29). The alpha helix structure can be stabilized by, e.g., formation of a covalent or non-covalent intramolecular bridge (e.g., a lactam bridge between side chains of amino acids at positions “i” and “i+4”, wherein i is an integer from 12 to 25), substitution and/or insertion of amino acids around positions 12-29 with an alpha helix-stabilizing amino acid (e.g., an α,α-disubstituted amino acid), as further described herein.

### Modifications at Position 3

[0330] Glucagon receptor activity can be reduced by an amino acid modification at position 3 (according to the amino acid numbering of wild type glucagon), e.g. substitution of the naturally occurring glutamine at position 3, with an acidic, basic, or a hydrophobic amino acid. For example substitution at position 3 with glutamic acid, ornithine, or norleucine substantially reduces or destroys glucagon receptor activity.

[0331] Maintained or enhanced activity at the glucagon receptor may be achieved by modifying the Gln at position 3 with a glutamine analog as described herein. For example, glucagon agonists can comprise the amino acid sequence of SEQ ID NO: 863, SEQ ID NO: 869, SEQ ID NO: 870, SEQ ID NO: 871, SEQ ID NO: 872, SEQ ID NO: 873, and SEQ ID NO: 874.

Enhancing GLP-1 Activity with C-Terminal Amides and Esters

[0332] Enhanced activity at the GLP-1 receptor is provided by replacing the carboxylic acid of the C-terminal amino acid with a charge-neutral group, such as an amide or ester. Conversely, retaining the native carboxylic acid at the C-terminus of the peptide maintains the relatively greater selectivity of the Class 1 glucagon related peptide for the glucagon receptor vs. the GLP-1 receptor (e.g., greater than about 5, 6, 7, 8, 9, 10, 11, 12, 13, 14, 15, 16, 17, 18, 19, or 20-fold).

### Further Modifications and Combinations

[0333] Additional modifications may be made to the Class 1 glucagon related peptide which may further increase solubility and/or stability and/or glucagon activity. The Class 1 glucagon related peptide may alternatively comprise other modifications that do not substantially affect solubility or stability, and that do not substantially decrease glucagon activity. In exemplary embodiments, the Class 1 glucagon related peptide may comprise a total of up to 11, or up to 12, or up to 13, or up to 14 amino acid modifications relative to the native glucagon sequence. For example, conservative or non-conservative substitutions, additions or deletions may be carried out at any of positions 2, 5, 7, 10, 11, 12, 13, 14, 17, 18, 19, 20, 21, 24, 27, 28 or 29.

[0334] Exemplary modifications of the Class 1 glucagon related peptide include but are not limited to:

[0335] (a) non-conservative substitutions, conservative substitutions, additions or deletions while retaining at least partial glucagon agonist activity, for example, conservative substitutions at one or more of positions 2, 5, 7, 10, 11, 12, 13, 14, 16, 17, 18, 19, 20, 21, 24, 27, 28 or 29, substitution of Tyr at position 10 with Val or Phe, substitution of Lys at position 12 with Arg, substitution of one or more of these positions with Ala;

[0336] (b) deletion of amino acids at positions 29 and/or 28, and optionally position 27, while retaining at least partial glucagon agonist activity;

[0337] (c) modification of the aspartic acid at position 15, for example, by substitution with glutamic acid, homoglutamic acid, cysteic acid or homocysteic acid, which may reduce degradation; or modification of the serine at position 16, for example, by substitution of threonine, Aib, glutamic acid or with another negatively charged amino acid having a side chain with a length of 4 atoms, or alternatively with any one of glutamine, homoglutamic acid, or homocysteic acid, which likewise may reduce degradation due to cleavage of the Asp15-Ser16 bond;

[0338] (d) addition of a hydrophilic moiety such as the water soluble polymer polyethylene glycol, as described herein, e.g. at position 16, 17, 20, 21, 24, 29, 40 or at the C-terminal amino acid, which may increase solubility and/or half-life;

[0339] (e) modification of the methionine at position 27, for example, by substitution with leucine or norleucine, to reduce oxidative degradation;

[0340] (f) modification of the Gln at position 20 or 24, e.g. by substitution with Ser, Thr, Ala or Aib, to reduce degradation that occurs through deamidation of Gln

[0341] (g) modification of Asp at position 21, e.g. by substitution with Glu, to reduce degradation that occurs through dehydration of Asp to form a cyclic succinimide intermediate followed by isomerization to iso-aspartate;

[0342] (h) modifications at position 1 or 2 as described herein that improve resistance to DPP-IV cleavage, optionally in combination with an intramolecular bridge such as a lactam bridge between positions “i” and “i+4”, wherein i is an integer from 12 to 25, e.g., 12, 16, 20, 24;

[0343] (i) acylating or alkylating the glucagon peptide as described herein, which may increase the activity at the glucagon receptor and/or the GLP-1 receptor, increase half-life in circulation and/or extending the duration of action and/or delaying the onset of action, optionally combined with addition of a hydrophilic moiety, additionally or alternatively, optionally combined with a modification which selectively reduces activity at the GLP-1 peptide, e.g., a modification of the Thr at position 7, such as a substitution of the Thr at position 7 with an amino acid lacking a hydroxyl group, e.g., Abu or Ile; deleting amino acids C-terminal to the amino acid at position 27 (e.g., deleting one or both of the amino acids at positions 28 and 29, yielding a peptide 27 or 28 amino acids in length);

[0344] (j) C-terminal extensions as described herein;

[0345] (k) homodimerization or heterodimerization as described herein; and

[0346] combinations of the (a) through (k).

[0347] In some embodiments, exemplary modifications of the Class 1 glucagon related peptide include at least one amino acid modification selected from Group A and one or more amino acid modifications selected from Group B and/or Group C,

wherein Group A is:

[0348] substitution of Asn at position 28 with a charged amino acid;

[0349] substitution of Asn at position 28 with a charged amino acid selected from the group consisting of Lys, Arg, His, Asp, Glu, cysteic acid, and homocysteic acid;

[0350] substitution at position 28 with Asn, Asp, or Glu;

[0351] substitution at position 28 with Asp;

[0352] substitution at position 28 with Glu;

[0353] substitution of Thr at position 29 with a charged amino acid;

[0354] substitution of Thr at position 29 with a charged amino acid selected from the group consisting of Lys, Arg, His, Asp, Glu, cysteic acid, and homocysteic acid;

[0355] substitution at position 29 with Asp, Glu, or Lys;

[0356] substitution at position 29 with Glu;

[0357] insertion of 1-3 charged amino acids after position 29;

[0358] insertion after position 29 of Glu or Lys;

[0359] insertion after position 29 of Gly-Lys or Lys-Lys;

[0360] or combinations thereof;

wherein Group B is:

[0361] substitution of Asp at position 15 with Glu;

[0362] substitution of Ser at position 16 with Thr or Aib;

and wherein Group C is:

[0363] substitution of His at position 1 with a non-native amino acid that reduces susceptibility of the glucagon peptide to cleavage by dipeptidyl peptidase IV (DPP-IV),

[0364] substitution of Ser at position 2 with a non-native amino acid that reduces susceptibility of the glucagon peptide to cleavage by dipeptidyl peptidase IV (DPP-IV),

[0365] substitution of Lys at position 12 with Arg;

[0366] substitution of Gln at position 20 with Ser, Thr, Ala or Aib;

[0367] substitution of Asp at position 21 with Glu;

[0368] substitution of Gln at position 24 with Ser, Thr, Ala or Aib;

[0369] substitution of Met at position 27 with Leu or Nle;

[0370] deletion of amino acids at positions 27-29;

[0371] deletion of amino acids at positions 28-29;

[0372] deletion of the amino acid at positions 29;

[0373] or combinations thereof.

[0374] In exemplary embodiments, Lys at position 12 is substituted with Arg. In other exemplary embodiments amino acids at positions 29 and/or 28, and optionally at position 27, are deleted.

[0375] In some specific embodiments, the glucagon peptide comprises (a) an amino acid modification at position 1 and/or 2 that confers DPP-IV resistance, e.g., substitution with DMIA at position 1, or Aib at position 2, (b) an intramolecular bridge within positions 12-29, e.g. at positions 16 and 20, or one or more substitutions of the amino acids at positions 16, 20, 21, and 24 with an α,α disubstituted amino acid, optionally (c) linked to a hydrophilic moiety such as PEG, e.g., through Cys at position 24, 29 or at the C-terminal amino acid, optionally (d) an amino acid modification at position 27 that substitutes Met with, e.g., Nle, optionally (e) amino acid modifications at positions 20, 21 and 24 that reduce degradation, and optionally (f) linked to SEQ ID NO: 820. When the glucagon peptide is linked to SEQ ID NO: 820, the amino acid at position 29 in certain embodiments is Thr or Gly. In other specific embodiments, the glucagon peptide comprises (a) Asp28Glu29, or Glu28Glu29, or Glu29Glu30, or Glu28Glu30 or Asp28Glu30, and optionally (b) an amino acid modification at position 16 that substitutes Ser with, e.g. Thr or Aib, and optionally (c) an amino acid modification at position 27 that substitutes Met with, e.g., Nle, and optionally (d) amino acid modifications at positions 20, 21 and 24 that reduce degradation. In a specific embodiment, the glucagon peptide is T16, A20, E21, A24, Nle27, D28, E29.

[0376] In some embodiments, the Class 1 glucagon related peptide comprises the amino acid sequence:

[0377] X1-X2-Gln-Gly-Thr-Phe-Thr-Ser-Asp-Tyr-Ser-Lys-Tyr-Leu-Asp-Ser-Arg-Arg-Ala-Gln-Asp-Phe-Val-Gln-Trp-Leu-Met-Z (SEQ ID NO: 839) with 1 to 3 amino acid modifications thereto,

[0378] wherein X1 and/or X2 is a non-native amino acid that reduces susceptibility of (or increases resistance of) the glucagon peptide to cleavage by dipeptidyl peptidase IV (DPP-IV),

[0379] wherein Z is selected from the group consisting of —COOH (the naturally occurring C-terminal carboxylate), -Asn-COOH, Asn-Thr-COOH, and Y—COOH, wherein Y is 1 to 2 amino acids, and

[0380] wherein an intramolecular bridge, preferably a covalent bond, connects the side chains of an amino acid at position i and an amino acid at position i+4, wherein i is 12, 16, 20 or 24.

[0381] In some embodiments, the intramolecular bridge is a lactam bridge. In some embodiments, the amino acids at positions i and i+4 of SEQ ID NO: 839 are Lys and Glu, e.g., Glu16 and Lys20. In some embodiments, X1 is selected from the group consisting of: D-His, N-methyl-His, alpha-methyl-His, imidazole acetic acid, des-amino-His, hydroxyl-His, acetyl-His, homo-His, and alpha, alpha-dimethyl imidiazole acetic acid (DMIA). In other embodiments, X2 is selected from the group consisting of: D-Ser, D-Ala, Gly, N-methyl-Ser, Val, and alpha, amino isobutyric acid (Aib). In some embodiments, the glucagon peptide is covalently linked to a hydrophilic moiety at any of amino acid positions 16, 17, 20, 21, 24, 29, 40, within a C-terminal extension, or at the C-terminal amino acid. In exemplary embodiments, this hydrophilic moiety is covalently linked to a Lys, Cys, Orn, homocysteine, or acetyl-phenylalanine residue at any of these positions. Exemplary hydrophilic moieties include polyethylene glycol (PEG), for example, of a molecular weight of about 1,000 Daltons to about 40,000 Daltons, or about 20,000 Daltons to about 40,000 Daltons.

[0382] In other embodiments, the Class I glucagon related peptide comprises the amino acid sequence:

(SEQ ID NO: 839)
X1-X2-Gln-Gly-Thr-Phe-Thr-Ser-Asp-Tyr-Ser-Lys-Tyr-Leu-Asp-Ser-Arg-Arg-Ala-Gln-
Asp-Phe-Val-Gln-Trp-Leu-Met-Z,

[0383] wherein X1 and/or X2 is a non-native amino acid that reduces susceptibility of (or increases resistance of) the glucagon peptide to cleavage by dipeptidyl peptidase IV (DPP-IV),

[0384] wherein one, two, three, four or more of positions 16, 20, 21, and 24 of the glucagon peptide is substituted with an α,α-disubstituted amino acid, and

[0385] wherein Z is selected from the group consisting of —COOH (the naturally occurring C-terminal carboxylate), -Asn-COOH, Asn-Thr-COOH, and Y—COOH, wherein Y is 1 to 2 amino acids.

[0386] Exemplary further amino acid modifications to the foregoing Class 1 glucagon related peptides or analogs include substitution of Thr at position 7 with an amino acid lacking a hydroxyl group, e.g., aminobutyric acid (Abu), Ile, optionally, in combination with substitution or addition of an amino acid comprising a side chain covalently attached (optionally, through a spacer) to an acyl or alkyl group, which acyl or alkyl group is non-native to a naturally-occurring amino acid, substitution of Lys at position 12 with Arg; substitution of Asp at position 15 with Glu; substitution of Ser at position 16 with Thr or Aib; substitution of Gln at position 20 with Ser, Thr, Ala or Aib; substitution of Asp at position 21 with Glu; substitution of Gln at position 24 with Ser, Thr, Ala or Aib; substitution of Met at position 27 with Leu or Nle; substitution of Asn at position 28 with a charged amino acid; substitution of Asn at position 28 with a charged amino acid selected from the group consisting of Lys, Arg, His, Asp, Glu, cysteic acid, and homocysteic acid; substitution at position 28 with Asn, Asp, or Glu; substitution at position 28 with Asp; substitution at position 28 with Glu; substitution of Thr at position 29 with a charged amino acid; substitution of Thr at position 29 with a charged amino acid selected from the group consisting of Lys, Arg, His, Asp, Glu, cysteic acid, and homocysteic acid; substitution at position 29 with Asp, Glu, or Lys; substitution at position 29 with Glu; insertion of 1-3 charged amino acids after position 29; insertion at position 30 (i.e., after position 29) of Glu or Lys; optionally with insertion at position 31 of Lys; addition of SEQ ID NO: 820 to the C-terminus, optionally, wherein the amino acid at position 29 is Thr or Gly; substitution or addition of an amino acid covalently attached to a hydrophilic moiety; or a combination thereof.

[0387] Any of the modifications described above in reference to Class 1 glucagon agonists which increase glucagon receptor activity, retain partial glucagon receptor activity, improve solubility, increase stability, or reduce degradation can be applied to Class 1 glucagon peptides individually or in combination. Thus, Class 1 glucagon related peptides can be prepared that retain at least 20% of the activity of native glucagon at the glucagon receptor, and which are soluble at a concentration of at least 1 mg/mL at a pH between 6 and 8 or between 6 and 9, (e.g. pH 7), and optionally retain at least 95% of the original peptide (e.g. 5% or less of the original peptide is degraded or cleaved) after 24 hours at 25° C. Alternatively, high potency Class 1 glucagon peptides can be prepared that exhibit at least about 100%, 125%, 150%, 175%, 200%, 250%, 300%, 350%, 400%, 450%, 500%, 600%, 700%, 800%, 900% or 10-fold or more of the activity of native glucagon at the glucagon receptor, and optionally are soluble at a concentration of at least 1 mg/mL at a pH between 6 and 8 or between 6 and 9, (e.g. pH 7), and optionally retains at least 95% of the original peptide (e.g. 5% or less of the original peptide is degraded or cleaved) after 24 hours at 25° C. In some embodiments, the Class 1 glucagon peptides described herein may exhibit at least any of the above indicated relative levels of activity at the glucagon receptor but no more than 1,000%, 5,000% or 10,000% of the activity of native glucagon at the glucagon receptor.

### Examples of Embodiments of Class 1 Glucagon Related Peptides

[0388] In accordance with some embodiments the native glucagon peptide of SEQ ID NO: 801 is modified by the substitution of the native amino acid at position 28 and/or 29 with a negatively charged amino acid (e.g., aspartic acid or glutamic acid) and optionally the addition of a negatively charged amino acid (e.g., aspartic acid or glutamic acid) to the carboxy terminus of the peptide. In an alternative embodiment the native glucagon peptide of SEQ ID NO: 801 is modified by the substitution of the native amino acid at position 29 with a positively charged amino acid (e.g., lysine, arginine or histidine) and optionally the addition of one or two positively charged amino acid (e.g., lysine, arginine or histidine) on the carboxy terminus of the peptide. In accordance with some embodiments a glucagon analog having improved solubility and stability is provided wherein the analog comprises the amino acid sequence of SEQ ID NO: 834 with the proviso that at least one amino acids at position, 28, or 29 is substituted with an acidic amino acid and/or an additional acidic amino acid is added at the carboxy terminus of SEQ ID NO: 834. In some embodiments the acidic amino acids are independently selected from the group consisting of Asp, Glu, cysteic acid and homocysteic acid.

[0389] In accordance with some embodiments a glucagon agonist having improved solubility and stability is provided wherein the agonist comprises the amino acid sequence of SEQ ID NO: 833, wherein at least one of the amino acids at positions 27, 28 or 29 is substituted with a non-native amino acid residue (i.e. at least one amino acid present at position 27, 28 or 29 of the analog is an acid amino acid different from the amino acid present at the corresponding position in SEQ ID NO: 801). In accordance with some embodiments a glucagon agonist is provided comprising the sequence of SEQ ID NO: 833 with the proviso that when the amino acid at position 28 is asparagine and the amino acid at position 29 is threonine, the peptide further comprises one to two amino acids, independently selected from the group consisting of Lys, Arg, His, Asp or Glu, added to the carboxy terminus of the glucagon peptide.

[0390] It has been reported that certain positions of the native glucagon peptide can be modified while retaining at least some of the activity of the parent peptide. Accordingly, applicants anticipate that one or more of the amino acids located at positions at positions 2, 5, 7, 10, 11, 12, 13, 14, 16, 17, 18, 19, 20, 21, 24, 27, 28 or 29 of the peptide of SEQ ID NO: 811 can be substituted with an amino acid different from that present in the native glucagon peptide, and still retain the enhanced potency, physiological pH stability and biological activity of the parent glucagon peptide. For example, in accordance with some embodiments the methionine residue present at position 27 of the native peptide is changed to leucine or norleucine to prevent oxidative degradation of the peptide.

[0391] In some embodiments a glucagon analog of SEQ ID NO: 833 is provided wherein 1 to 6 amino acids, selected from positions 1, 2, 5, 7, 10, 11, 12, 13, 14, 16, 17, 18, 19, 20, 21 or 24 of the analog differ from the corresponding amino acid of SEQ ID NO: 801. In accordance with another embodiment a glucagon analog of SEQ ID NO: 833 is provided wherein 1 to 3 amino acids selected from positions 1, 2, 5, 7, 10, 11, 12, 13, 14, 16, 17, 18, 19, 20, 21 or 24 of the analog differ from the corresponding amino acid of SEQ ID NO: 801. In another embodiment, a glucagon analog of SEQ ID NO: 807, SEQ ID NO: 808 or SEQ ID NO: 834 is provided wherein 1 to 2 amino acids selected from positions 1, 2, 5, 7, 10, 11, 12, 13, 14, 16, 17, 18, 19, 20, 21 or 24 of the analog differ from the corresponding amino acid of SEQ ID NO: 801, and in a further embodiment those one to two differing amino acids represent conservative amino acid substitutions relative to the amino acid present in the native sequence (SEQ ID NO: 801). In some embodiments a glucagon peptide of SEQ ID NO: 811 or SEQ ID NO: 813 is provided wherein the glucagon peptide further comprises one, two or three amino acid substitutions at positions selected from positions 2, 5, 7, 10, 11, 12, 13, 14, 16, 17, 18, 19, 20, 21, 24, 27 or 29. In some embodiments the substitutions at positions 2, 5, 7, 10, 11, 12, 13, 14, 16, 17, 18, 19, 20, 27 or 29 are conservative amino acid substitutions.

[0392] In some embodiments a glucagon agonist is provided comprising an analog peptide of SEQ ID NO: 801 wherein the analog differs from SEQ ID NO: 801 by having an amino acid other than serine at position 2 and by having an acidic amino acid substituted for the native amino acid at position 28 or 29 or an acidic amino acid added to the carboxy terminus of the peptide of SEQ ID NO: 801. In some embodiments the acidic amino acid is aspartic acid or glutamic acid. In some embodiments a glucagon analog of SEQ ID NO: 809, SEQ ID NO: 812, SEQ ID NO: 813 or SEQ ID NO: 832 is provided wherein the analog differs from the parent molecule by a substitution at position 2. More particularly, position 2 of the analog peptide is substituted with an amino acid selected from the group consisting of D-serine, alanine, D-alanine, glycine, n-methyl serine and amino isobutyric acid.

[0393] In another embodiment a glucagon agonist is provided comprising an analog peptide of SEQ ID NO: 801 wherein the analog differs from SEQ ID NO: 801 by having an amino acid other than histidine at position 1 and by having an acidic amino acid substituted for the native amino acid at position 28 or 29 or an acidic amino acid added to the carboxy terminus of the peptide of SEQ ID NO: 801. In some embodiments the acidic amino acid is aspartic acid or glutamic acid. In some embodiments a glucagon analog of SEQ ID NO: 809, SEQ ID NO: 812, SEQ ID NO: 813 or SEQ ID NO: 832 is provided wherein the analog differs from the parent molecule by a substitution at position 1. More particularly, position 1 of the analog peptide is substituted with an amino acid selected from the group consisting of DMIA, D-histidine, desaminohistidine, hydroxyl-histidine, acetyl-histidine and homo-histidine.

[0394] In accordance with some embodiments the modified glucagon peptide comprises a sequence selected from the group consisting of SEQ ID NO: 809, SEQ ID NO: 812, SEQ ID NO: 813 and SEQ ID NO: 832. In a further embodiment a glucagon peptide is provided comprising a sequence of SEQ ID NO: 809, SEQ ID NO: 812, SEQ ID NO: 813 or SEQ ID NO: 832 further comprising one to two amino acids, added to the C-terminus of SEQ ID NO: 809,

[0395] SEQ ID NO: 812, SEQ ID NO: 813 or SEQ ID NO: 832, wherein the additional amino acids are independently selected from the group consisting of Lys, Arg, His, Asp Glu, cysteic acid or homocysteic acid. In some embodiments the additional amino acids added to the carboxy terminus are selected from the group consisting of Lys, Arg, His, Asp or Glu or in a further embodiment the additional amino acids are Asp or Glu.

[0396] In another embodiment the glucagon peptide comprises the sequence of SEQ ID NO: 807 or a glucagon agonist analog thereof. In some embodiments the peptide comprising a sequence selected from the group consisting of SEQ ID NO: 808, SEQ ID NO: 810, SEQ ID NO: 811, SEQ ID NO: 812 and SEQ ID NO: 813. In another embodiment the peptide comprising a sequence selected from the group consisting of SEQ ID NO: 808, SEQ ID NO: 810 and SEQ ID NO: 811. In some embodiments the glucagon peptide comprises the sequence of SEQ ID NO: 808, SEQ ID NO: 810 and SEQ ID NO: 811 further comprising an additional amino acid, selected from the group consisting of Asp and Glu, added to the C-terminus of the glucagon peptide. In some embodiments the glucagon peptide comprises the sequence of SEQ ID NO: 811 or SEQ ID NO: 813, and in a further embodiment the glucagon peptide comprises the sequence of SEQ ID NO: 811.

[0397] In accordance with some embodiments a glucagon agonist is provided comprising a modified glucagon peptide selected from the group consisting of:

(SEQ ID NO: 834)
NH₂-His-Ser-Gln-Gly-Thr-Phe-Thr-Ser-Asp-Tyr-Ser-Lys-Tyr-Leu-Xaa-Ser-Arg-Arg-
Ala-Gln-Asp-Phe-Val-Gln-Trp-Leu-Xaa-Xaa-Xaa-R,
(SEQ ID NO: 811)
NH₂-His-Ser-Gln-Gly-Thr-Phe-Thr-Ser-Asp-Tyr-Ser-Lys-Tyr-Leu-Asp-Ser-Arg-Arg-
Ala-Gln-Asp-Phe-Val-Gln-Trp-Leu-Met-Asp-Thr-R
and
(SEQ ID NO: 813)
NH₂-His-Ser-Gln-Gly-Thr-Phe-Thr-Ser-Asp-Tyr-Ser-Xaa-Tyr-Leu-Glu-Ser-Arg-Arg-
Ala-Gln-Asp-Phe-Val-Gln-Trp-Leu-Met-Asp-Thr-R

[0398] wherein Xaa at position 15 is Asp, Glu, cysteic acid, homoglutamic acid or homocysteic acid, the Xaa at position 28 is Asn or an acidic amino acid and the Xaa at position 29 is Thr or an acidic amino acid and R is an acidic amino acid, COOH or CONH₂, with the proviso that an acidic acid residue is present at one of positions 28, 29 or 30. In some embodiments R is COOH, and in another embodiment R is CONH₂.

[0399] The present disclosure also encompasses glucagon fusion peptides wherein a second peptide has been fused to the C-terminus of the glucagon peptide to enhance the stability and solubility of the glucagon peptide. More particularly, the fusion glucagon peptide may comprise a glucagon agonist analog comprising a glucagon peptide NH₂-His-Ser-Gln-Gly-Thr-Phe-Thr-Ser-Asp-Tyr-Ser-Lys-Tyr-Leu-Xaa-Ser-Arg-Arg-Ala-Gln-Asp-Phe-Val-Gln-Trp-Leu-Xaa-Xaa-Xaa-R (SEQ ID NO: 834), wherein R is an acidic amino acid or a bond and an amino acid sequence of SEQ ID NO: 820 (GPSSGAPPPS), SEQ ID NO: 821 (KRNRNNIA) or SEQ ID NO: 822 (KRNR) linked to the carboxy terminal amino acid of the glucagon peptide. In some embodiments the glucagon peptide is selected from the group consisting of SEQ ID NO: 833, SEQ ID NO: 807 or SEQ ID NO: 808 further comprising an amino acid sequence of SEQ ID NO: 820 (GPSSGAPPPS), SEQ ID NO: 821 (KRNRNNIA) or SEQ ID NO: 822 (KRNR) linked to the carboxy terminal amino acid of the glucagon peptide. In some embodiments the glucagon fusion peptide comprises SEQ ID NO: 802, SEQ ID NO: 803, SEQ ID NO: 804, SEQ ID NO: 805 and SEQ ID NO: 806 or a glucagon agonist analog thereof, further comprising an amino acid sequence of SEQ ID NO: 820 (GPSSGAPPPS), SEQ ID NO: 821 (KRNRNNIA) or SEQ ID NO: 822 (KRNR) linked to amino acid 29 of the glucagon peptide. In accordance with some embodiments the fusion peptide further comprises a PEG chain linked to an amino acid at position 16, 17, 21, 24, 29, within a C-terminal extension, or at the C-terminal amino acid, wherein the PEG chain is selected from the range of 500 to 40,000 Daltons. In some embodiments the amino acid sequence of SEQ ID NO: 820 (GPSSGAPPPS), SEQ ID NO: 821 (KRNRNNIA) or SEQ ID NO: 822 (KRNR) is bound to amino acid 29 of the glucagon peptide through a peptide bond. In some embodiments the glucagon peptide portion of the glucagon fusion peptide comprises a sequence selected from the group consisting of SEQ ID NO: 810, SEQ ID NO: 811 and SEQ ID NO: 813. In some embodiments the glucagon peptide portion of the glucagon fusion peptide comprises the sequence of SEQ ID NO: 811 or SEQ ID NO: 813, wherein a PEG chain is linked at position 21, 24, 29, within a C-terminal extension or at the C-terminal amino acid, respectively.

[0400] In another embodiment the glucagon peptide sequence of the fusion peptide comprises the sequence of SEQ ID NO: 811, further comprising an amino acid sequence of SEQ ID NO: 820 (GPSSGAPPPS), SEQ ID NO: 821 (KRNRNNIA) or SEQ ID NO: 822 (KRNR) linked to amino acid 29 of the glucagon peptide. In some embodiments the glucagon fusion peptide comprises a sequence selected from the group consisting of SEQ ID NO: 824, SEQ ID NO: 825 and SEQ ID NO: 826. Typically the fusion peptides of the present invention will have a C-terminal amino acid with the standard carboxylic acid group. However, analogs of those sequences wherein the C-terminal amino acid has an amide substituted for the carboxylic acid are also encompassed as embodiments. In accordance with some embodiments the fusion glucagon peptide comprises a glucagon agonist analog selected from the group consisting of SEQ ID NO: 810, SEQ ID NO: 811 and SEQ ID NO: 813, further comprising an amino acid sequence of SEQ ID NO: 823 (GPSSGAPPPS-CONH₂) linked to amino acid 29 of the glucagon peptide.

[0401] The glucagon agonists of the present invention can be further modified to improve the peptide's solubility and stability in aqueous solutions while retaining the biological activity of the glucagon peptide. In accordance with some embodiments, introduction of hydrophilic groups at one or more positions selected from positions 16, 17, 20, 21, 24 and 29 of the peptide of SEQ ID NO: 811, or a glucagon agonist analog thereof, are anticipated to improve the solubility and stability of the pH stabilize glucagon analog. More particularly, in some embodiments the glucagon peptide of SEQ ID NO: 810, SEQ ID NO: 811, SEQ ID NO: 813, or SEQ ID NO: 832 is modified to comprise one or more hydrophilic groups covalently linked to the side chains of amino acids present at positions 21 and 24 of the glucagon peptide.

[0402] In accordance with some embodiments, the glucagon peptide of SEQ ID NO: 811 is modified to contain one or more amino acid substitution at positions 16, 17, 20, 21, 24 and/or 29,

[0403] wherein the native amino acid is substituted with an amino acid having a side chain suitable for crosslinking with hydrophilic moieties, including for example, PEG. The native peptide can be substituted with a naturally occurring amino acid or a synthetic (non-naturally occurring) amino acid. Synthetic or non-naturally occurring amino acids refer to amino acids that do not naturally occur in vivo but which, nevertheless, can be incorporated into the peptide structures described herein.

[0404] In some embodiments, a glucagon agonist of SEQ ID NO: 810, SEQ ID NO: 811 or SEQ ID NO: 813 is provided wherein the native glucagon peptide sequence has been modified to contain a naturally occurring or synthetic amino acid in at least one of positions 16, 17, 21, 24, 29, within a C-terminal extension or at the C-terminal amino acid of the native sequence, wherein the amino acid substitute further comprises a hydrophilic moiety. In some embodiments the substitution is at position 21 or 24, and in a further embodiment the hydrophilic moiety is a PEG chain. In some embodiments the glucagon peptide of SEQ ID NO: 811 is substituted with at least one cysteine residue, wherein the side chain of the cysteine residue is further modified with a thiol reactive reagent, including for example, maleimido, vinyl sulfone, 2-pyridylthio, haloalkyl, and haloacyl. These thiol reactive reagents may contain carboxy, keto, hydroxyl, and ether groups as well as other hydrophilic moieties such as polyethylene glycol units. In an alternative embodiment, the native glucagon peptide is substituted with lysine, and the side chain of the substituting lysine residue is further modified using amine reactive reagents such as active esters (succinimido, anhydride, etc) of carboxylic acids or aldehydes of hydrophilic moieties such as polyethylene glycol. In some embodiments the glucagon peptide is selected form the group consisting of SEQ ID NO: 814, SEQ ID NO: 815, SEQ ID NO: 816, SEQ ID NO: 817, SEQ ID NO: 818 and SEQ ID NO: 819.

[0405] In accordance with some embodiments the pegylated glucagon peptide comprises two or more polyethylene glycol chains covalently bound to the glucagon peptide wherein the total molecular weight of the glucagon chains is about 1,000 to about 5,000 Daltons. In some embodiments the pegylated glucagon agonist comprises a peptide of SEQ ID NO: 806, wherein a PEG chain is covalently linked to the amino acid residue at position 21 and at position 24, and wherein the combined molecular weight of the two PEG chains is about 1,000 to about 5,000 Daltons. In another embodiment the pegylated glucagon agonist comprises a peptide of SEQ ID NO: 806, wherein a PEG chain is covalently linked to the amino acid residue at position 21 and at position 24, and wherein the combined molecular weight of the two PEG chains is about 5,000 to about 20,000 Daltons.

[0406] The polyethylene glycol chain may be in the form of a straight chain or it may be branched. In accordance with some embodiments the polyethylene glycol chain has an average molecular weight selected from the range of about 500 to about 40,000 Daltons. In some embodiments the polyethylene glycol chain has a molecular weight selected from the range of about 500 to about 5,000 Daltons. In another embodiment the polyethylene glycol chain has a molecular weight of about 20,000 to about 40,000 Daltons.

[0407] Any of the glucagon peptides described above may be further modified to include a covalent or non-covalent intramolecular bridge or an alpha helix-stabilizing amino acid within the C-terminal portion of the glucagon peptide (amino acid positions 12-29). In accordance with some embodiments, the glucagon peptide comprises any one or more of the modifications discussed above in addition to an amino acid substitution at positions 16, 20, 21, or 24 (or a combination thereof) with an α,α-disubstituted amino acid, e.g., Aib. In accordance with another embodiment, the glucagon peptide comprises any one or more modifications discussed above in addition to an intramolecular bridge, e.g., a lactam, between the side chains of the amino acids at positions 16 and 20 of the glucagon peptide.

[0408] In accordance with some embodiments, the glucagon peptide comprises the amino acid sequence of SEQ ID NO: 877, wherein the Xaa at position 3 is an amino acid comprising a side chain of Structure I, II, or III:

[chemical structure]

wherein R¹ is C₀₋₃ alkyl or C₀₋₃ heteroalkyl; R² is NHR⁴ or C₁₋₃ alkyl; R³ is C₁₋₃ alkyl; R⁴ is H or C₁₋₃ alkyl; X is NH, O, or S; and Y is NHR⁴, SR³, or OR³. In some embodiments, X is NH or Y is NHR⁴. In some embodiments, R¹ is C₀₋₂ alkyl or C₁ heteroalkyl. In some embodiments, R² is NHR⁴ or C₁ alkyl. In some embodiments, R⁴ is H or C¹ alkyl. In exemplary embodiments an amino acid comprising a side chain of Structure I is provided wherein, R¹ is CH₂—S, X is NH, and R² is CH₃ (acetamidomethyl-cysteine, C(Acm)); R¹ is CH₂, X is NH, and R² is CH₃ (acetyldiaminobutanoic acid, Dab(Ac)); R¹ is C₀ alkyl, X is NH, R² is NHR⁴, and R⁴ is H (carbamoyldiaminopropanoic acid, Dap(urea)); or R¹ is CH₂—CH₂, X is NH, and R² is CH₃ (acetylornithine, Orn(Ac)). In exemplary embodiments an amino acid comprising a side chain of Structure II is provided, wherein R¹ is CH₂, Y is NHR⁴, and R⁴ is CH₃ (methylglutamine, Q(Me)); In exemplary embodiments an amino acid comprising a side chain of Structure III is provided wherein, R¹ is CH₂ and R⁴ is H (methionine-sulfoxide, M(O)); In specific embodiments, the amino acid at position 3 is substituted with Dab(Ac). For example, glucagon agonists can comprise the amino acid sequence of SEQ ID NO: 863, SEQ ID NO: 869, SEQ ID NO: 871, SEQ ID NO: 872, SEQ ID NO: 873, and SEQ ID NO: 874.

[0409] In certain embodiments, the glucagon peptide is an analog of the glucagon peptide of SEQ ID NO: 877. In specific aspects, the analog comprises any of the amino acid modifications described herein, including, but not limited to: a substitution of Asn at position 28 with a charged amino acid; a substitution of Asn at position 28 with a charged amino acid selected from the group consisting of Lys, Arg, His, Asp, Glu, cysteic acid, and homocysteic acid; a substitution at position 28 with Asn, Asp, or Glu; a substitution at position 28 with Asp; a substitution at position 28 with Glu; a substitution of Thr at position 29 with a charged amino acid; a substitution of Thr at position 29 with a charged amino acid selected from the group consisting of Lys, Arg, His, Asp, Glu, cysteic acid, and homocysteic acid; a substitution at position 29 with Asp, Glu, or Lys; a substitution at position 29 with Glu; a insertion of 1-3 charged amino acids after position 29; an insertion after position 29 of Glu or Lys; an insertion after position 29 of Gly-Lys or Lys-Lys; and a combination thereof.

[0410] In certain embodiments, the analog of the glucagon peptide of SEQ ID NO: 877 comprises an α,α-disubstituted amino acid, such as Aib, at one, two, three, or all of positions 16, 20, 21, and 24.

[0411] In certain embodiments, the analog of the glucagon peptide of SEQ ID NO: 877 comprises one or more of the following: substitution of His at position 1 with a non-native amino acid that reduces susceptibility of the glucagon peptide to cleavage by dipeptidyl peptidase IV (DPP-IV), substitution of Ser at position 2 with a non-native amino acid that reduces susceptibility of the glucagon peptide to cleavage by dipeptidyl peptidase IV (DPP-IV), substitution of Thr at position 7 with an amino acid lacking a hydroxyl group, e.g., Abu or Ile; substitution of Tyr at position 10 with Phe or Val; substitution of Lys at position 12 with Arg; substitution of Asp at position 15 with Glu, substitution of Ser at position 16 with Thr or Aib; substitution of Gln at position 20 with Ala or Aib; substitution of Asp at position 21 with Glu; substitution of Gln at position 24 with Ala or Aib; substitution of Met at position 27 with Leu or Nle; deletion of amino acids at positions 27-29; deletion of amino acids at positions 28-29; deletion of the amino acid at positions 29; addition of the amino acid sequence of SEQ ID NO: 820 to the C-terminus, wherein the amino acid at position 29 is Thr or Gly, or a combination thereof.

[0412] In accordance with specific embodiments, the glucagon peptide comprises the amino acid sequence of any of SEQ ID NOs: 862-867 and 869-874.

[0413] In certain embodiments, the analog of the glucagon peptide comprising SEQ ID NO: 877 comprises a hydrophilic moiety, e.g., PEG, covalently linked to the amino acid at any of positions 16, 17, 20, 21, 24, and 29 or at the C-terminal amino acid.

[0414] In certain embodiments, the analog of the glucagon peptide comprising SEQ ID NO: 877 comprises an amino acid comprising a side chain covalently attached, optionally, through a spacer, to an acyl group or an alkyl group, which acyl group or alkyl group is non-native to a naturally-occurring amino acid. The acyl group in some embodiments is a C4 to C30 fatty acyl group. In other embodiments, the alkyl group is a C4 to C30 alkyl. In specific aspects, the acyl group or alkyl group is covalently attached to the side chain of the amino acid at position 10. In some embodiments, the amino acid at position 7 is Ile or Abu.

[0415] The glucagon agonist may be a peptide comprising the amino acid sequence of any of the SEQ ID NOs: 801-919, optionally with up to 1, 2, 3, 4, or 5 further modifications that retain glucagon agonist activity. In certain embodiments, the glucagon agonist comprises the amino acids of any of SEQ ID NOs: 859-919.

### Class 2 Glucagon Related Peptides

[0416] In certain embodiments, the glucagon related peptide is a Class 2 glucagon related peptide, which is described herein and in International Patent Publication No. WO 2010/011439, and U.S. Application No. 61/187,578, (filed on Jun. 16, 2009) the contents of which are incorporated by reference in their entirety.

[0417] The biological sequences referenced in the following section (SEQ ID NOs: 1001-1262) relating to Class 2 glucagon related peptides correspond to SEQ ID NOs: 1-262 in International Patent Publication No. WO 2010/011439. SEQ ID NOs: 1263 to 1275 relating to Class 2 glucagon related peptides correspond to SEQ ID NOs: 657 to 669 in U.S. Application No. 61/187,578.

### Activity

[0418] Native glucagon does not activate the GIP receptor, and normally has about 1% of the activity of native-GLP-1 at the GLP-1 receptor. Modifications to the native glucagon sequence described herein produce Class 2 glucagon related peptides that can exhibit potent glucagon activity equivalent to or better than the activity of native glucagon (SEQ ID NO: 1001), potent GIP activity equivalent to or better than the activity of native GIP (SEQ ID NO: 1004), and/or potent GLP-1 activity equivalent to or better than the activity of native GLP-1. In this regard, the Class 2 glucagon related peptide may be one of a glucagon/GIP co-agonist, glucagon/GIP/GLP-1 tri-agonist, GIP/GLP-1 co-agonist, or a GIP agonist glucagon peptide, as further described herein.

[0419] In some embodiments, the Class 2 glucagon related peptides described herein exhibit an EC₅₀ for GIP receptor activation activity of about 100 nM or less, or about 75, 50, 25, 10, 8, 6, 5, 4, 3, 2 or 1 nM or less. In some embodiments, the Class 2 glucagon related peptides exhibit an EC₅₀ for glucagon receptor activation of about 100 nM or less, or about 75, 50, 25, 10, 8, 6, 5, 4, 3, 2 or 1 nM or less. In some embodiments, the Class 2 glucagon related peptides exhibit an EC₅₀ for GLP-1 receptor activation of about 100 nM or less, or about 75, 50, 25, 10, 8, 6, 5, 4, 3, 2 or 1 nM or less. Receptor activation can be measured by in vitro assays measuring cAMP induction in HEK293 cells over-expressing the receptor, e.g. assaying HEK293 cells co-transfected with DNA encoding the receptor and a luciferase gene linked to cAMP responsive element as described in Example 2.

[0420] In some embodiments, Class 2 glucagon related peptides exhibit at least about 0.1%, 0.2%, 0.3%, 0.4%, 0.5%, 0.6%, 0.7%, 0.8%, 0.9%, 1%, 5%, 10%, 20%, 30%, 40%, 50%, 60%, 75%, 100%, 125%, 150%, 175% or 200% or higher activity at the GIP receptor relative to native GIP (GIP potency). In some embodiments, the glucagon peptides described herein exhibit no more than 1000%, 10,000%, 100,000%, or 1,000,000% activity at the GIP receptor relative to native GIP. In some embodiments, Class 2 glucagon related peptides exhibit at least about 1%, 5%, 10%, 20%, 30%, 40%, 50%, 60%, 75%, 100%, 125%, 150%, 175%, 200%, 250%, 300%, 350%, 400%, 450%, or 500% or higher activity at the glucagon receptor relative to native glucagon (glucagon potency). In some embodiments, the glucagon peptides described herein exhibit no more than 1000%, 10,000%, 100,000%, or 1,000,000% activity at the glucagon receptor relative to native glucagon. In some embodiments, Class 2 glucagon related peptides exhibit at least about 0.1%, 0.2%, 0.3%, 0.4%, 0.5%, 0.6%, 0.7%, 0.8%, 0.9%, 1%, 5%, 10%, 20%, 30%, 40%, 50%, 60%, 75%, 100%, 125%, 150%, 175% or 200% or higher activity at the GLP-1 receptor relative to native GLP-1 (GLP-1 potency). In some embodiments, the glucagon peptides described herein exhibit no more than 1000%, 10,000%, 100,000%, or 1,000,000% activity at the GLP-1 receptor relative to native GLP-1. A Class 2 glucagon related peptide's activity at a receptor relative to a native ligand of the receptor is calculated as the inverse ratio of EC₅₀s for the Class 2 glucagon related peptide vs. the native ligand.

[0421] In some embodiments, Class 2 glucagon related peptides exhibit activity at both the glucagon receptor and the GIP receptor (“glucagon/GIP co-agonists”). These Class 2 glucagon related peptides have lost native glucagon's selectivity for glucagon receptor compared to GIP receptor. In some embodiments, the EC₅₀ of the Class 2 glucagon related peptide at the GIP receptor is less than about 50-fold, 40-fold, 30-fold or 20-fold different (higher or lower) from its EC₅₀ at the glucagon receptor. In some embodiments, the GIP potency of the Class 2 glucagon related peptide is less than about 500-, 450-, 400-, 350-, 300-, 250-, 200-, 150-, 100-, 75-, 50-, 25-, 20-, 15-, 10-, or 5-fold different (higher or lower) from its glucagon potency. In some embodiments, the ratio of the EC₅₀ of the Class 2 glucagon related peptide at the GIP receptor divided by the EC₅₀ of the Class 2 glucagon related peptide at the glucagon receptor is less than about 100, 75, 60, 50, 40, 30, 20, 15, 10, or 5. In some embodiments, the ratio of the EC₅₀ at the GIP receptor divided by the EC₅₀ at the glucagon receptor is about 1 or less than about 1 (e.g., about 0.01, 0.013, 0.0167, 0.02, 0.025, 0.03, 0.05, 0.067, 0.1, 0.2). In some embodiments, the ratio of the GIP potency of the Class 2 glucagon related peptide compared to the glucagon potency of the Class 2 glucagon related peptide is less than about 500, 450, 400, 350, 300, 250, 200, 150, 100, 75, 60, 50, 40, 30, 20, 15, 10, or 5. In some embodiments, the ratio of the potency at the GIP receptor divided by the potency at the glucagon receptor is about 1 or less than about 1 (e.g., about 0.01, 0.013, 0.0167, 0.02, 0.025, 0.03, 0.05, 0.067, 0.1, 0.2). In some embodiments, GLP-1 activity have been significantly reduced or destroyed, e.g., by an amino acid modification at position 7, a deletion of the amino acid(s) C-terminal to the amino acid at position 27 or 28, yielding a 27- or 28-amino acid peptide, or a combination thereof.

[0422] In another aspect, Class 2 glucagon related peptides exhibit activity at the glucagon, GIP and GLP-1 receptors (“glucagon/GIP/GLP-1 tri-agonists”). These Class 2 glucagon related peptides have lost native glucagon's selectivity for the glucagon receptor compared to both the GLP-1 and GIP receptors. In some embodiments, the EC₅₀ of the Class 2 glucagon related peptide at the GIP receptor is less than about 50-fold, 40-fold, 30-fold or 20-fold different (higher or lower) from its respective EC₅₀s at the glucagon and GLP-1 receptors. In some embodiments, the GIP potency of the Class 2 glucagon related peptide is less than about 500-, 450-, 400-, 350-, 300-, 250-, 200-, 150-, 100-, 75-, 50-, 25-, 20-, 15-, 10-, or 5-fold different (higher or lower) from its glucagon and GLP-1 potencies. In some embodiments, the ratio of the EC₅₀ of the tri-agonist at the GIP receptor divided by the EC₅₀ of the tri-agonist at the GLP-1 receptor is less than about 100, 75, 60, 50, 40, 30, 20, 15, 10, or 5. In some embodiments, the ratio of the EC₅₀ at the GIP receptor divided by the EC₅₀ at the GLP-1 receptor is about 1 or less than about 1 (e.g., about 0.01, 0.013, 0.0167, 0.02, 0.025, 0.03, 0.05, 0.067, 0.1, 0.2). In some embodiments, the ratio of the GIP potency of the tri-agonist compared to the GLP-1 potency of the tri-agonist is less than about 100, 75, 60, 50, 40, 30, 20, 15, 10, or 5. In some embodiments, the ratio of the potency at the GIP receptor divided by the potency at the GLP-1 receptor is about 1 or less than about 1 (e.g., about 0.01, 0.013, 0.0167, 0.02, 0.025, 0.03, 0.05, 0.067, 0.1, 0.2). In related embodiments, the ratio of the EC₅₀ of the tri-agonist at the GIP receptor divided by the EC₅₀ of the tri-agonist at the glucagon receptor is less than about 100, 75, 60, 50, 40, 30, 20, 15, 10, or 5. In some embodiments, the ratio of the EC₅₀ at the GIP receptor divided by the EC₅₀ at the glucagon receptor is about 1 or less than about 1 (e.g., about 0.01, 0.013, 0.0167, 0.02, 0.025, 0.03, 0.05, 0.067, 0.1, 0.2). In some embodiments, the ratio of the GIP potency of the tri-agonist compared to the glucagon potency of the tri-agonist is less than about 500, 450, 400, 350, 300, 250, 200, 150, 100, 75, 60, 50, 40, 30, 20, 15, 10, or 5. In some embodiments, the ratio of the potency at the GIP receptor divided by the potency at the glucagon receptor is about 1 or less than about 1 (e.g., about 0.01, 0.013, 0.0167, 0.02, 0.025, 0.03, 0.05, 0.067, 0.1, 0.2). In some embodiments, the ratio of the EC₅₀ of the tri-agonist at the GLP-1 receptor divided by the EC₅₀ of the tri-agonist at the glucagon receptor is less than about 100, 75, 60, 50, 40, 30, 20, 15, 10, or 5. In some embodiments, the ratio of the EC₅₀ at the GLP-1 receptor divided by the EC₅₀ at the glucagon receptor is about 1 or less than about 1 (e.g., about 0.01, 0.013, 0.0167, 0.02, 0.025, 0.03, 0.05, 0.067, 0.1, 0.2). In some embodiments, the ratio of the GLP-1 potency of the tri-agonist compared to the glucagon potency of the tri-agonist is less than about 100, 75, 60, 50, 40, 30, 20, 15, 10, or 5. In some embodiments, the ratio of the potency at the GLP-1 receptor divided by the potency at the glucagon receptor is about 1 or less than about 1 (e.g., about 0.01, 0.013, 0.0167, 0.02, 0.025, 0.03, 0.05, 0.067, 0.1, 0.2).

[0423] In yet another aspect, Class 2 glucagon related peptides exhibit activity at the GLP-1 and GIP receptors, but in which the glucagon activity has been significantly reduced or destroyed (“GIP/GLP-1 co-agonists”), e.g., by an amino acid modification at position 3. For example, substitution at this position with an acidic, basic, or a hydrophobic amino acid (glutamic acid, ornithine, norleucine) reduces glucagon activity. In some embodiments, the EC₅₀ of the glucagon peptide at the GIP receptor is less than about 50-fold, 40-fold, 30-fold or 20-fold different (higher or lower) from its EC₅₀ at the GLP-1 receptor. In some embodiments, the GIP potency of the Class 2 glucagon related peptide is less than about 25-, 20-, 15-, 10-, or 5-fold different (higher or lower) from its GLP-1 potency. In some embodiments these Class 2 glucagon related peptides have about 10% or less of the activity of native glucagon at the glucagon receptor, e.g. about 1-10%, or about 0.1-10%, or greater than about 0.1% but less than about 10%. In some embodiments, the ratio of the EC₅₀ of the Class 2 glucagon related peptide at the GIP receptor divided by the EC₅₀ of the Class 2 glucagon related peptide at the GLP-1 receptor is less than about 100, 75, 60, 50, 40, 30, 20, 15, 10, or 5, and no less than 1. In some embodiments, the ratio of the GIP potency of the Class 2 glucagon related peptide compared to the GLP-1 potency of the Class 2 glucagon related peptide is less than about 100, 75, 60, 50, 40, 30, 20, 15, 10, or 5, and no less than 1.

[0424] In a further aspect, Class 2 glucagon related peptides exhibit activity at the GIP receptor, in which the glucagon and GLP-1 activity have been significantly reduced or destroyed (“GIP agonist glucagon peptides”), e.g., by amino acid modifications at positions 3 with Glu and 7 with Ile. In some embodiments, these Class 2 glucagon related peptides have about 10% or less of the activity of native glucagon at the glucagon receptor, e.g. about 1-10%, or about 0.1-10%, or greater than about 0.1%, 0.5%, or 1% but less than about 1%, 5%, or 10%. In some embodiments these Class 2 glucagon related peptides also have about 10% or less of the activity of native GLP-1 at the GLP-1 receptor, e.g. about 1-10%, or about 0.1-10%, or greater than about 0.1%, 0.5%, or 1% but less than about 1%, 5%, or 10%.

[0425] In some embodiments, when the Class 2 glucagon related peptide is not pegylated, the EC₅₀ of the Class 2 glucagon related peptide for GIP receptor activation is about 4, 2, 1 nM or less, or the analog has at least about 1%, 2%, 3%, 4% or 5% of the activity of native GIP at the GIP receptor. In related embodiments, the EC₅₀ of the unpegylated Class 2 glucagon related peptide for GLP-1 receptor activation is about 4, 2, 1 nM or less or has at least about 1%, 2%, 3%, 4% or 5% of the activity of native GLP-1 at the GLP-1 receptor. In yet other related embodiments, the EC₅₀ of the unpegylated Class 2 glucagon related peptide for glucagon receptor activation is about 4, 2, 1 nM or less, or at least about 5%, 10%, 15% or 20% of the activity of native glucagon at the glucagon receptor. In some embodiments, the unpegylated Class 2 glucagon related peptide has less than about 1% of the activity of native glucagon at the glucagon receptor. In other embodiments, the unpegylated Class 2 glucagon related peptide has less than about 10%, 5% or 1% of the activity of native GLP-1 at the GLP-1 receptor.

[0426] In embodiments where the Class 2 glucagon related peptides are linked to hydrophilic moieties such as PEG, the relative EC₅₀s at one or more receptors may be higher e.g., about 10-fold higher. For example, the EC₅₀ of a pegylated analog for GIP receptor activation is about 10 nM or less, or the Class 2 glucagon related peptide has at least about 0.1%, 0.2%, 0.3%, 0.4% or 0.5% of the activity of native GIP at the GIP receptor. In related embodiments, the EC₅₀ of a pegylated Class 2 glucagon related peptide for GLP-1 receptor activation is about 10 nM or less or has at least about 0.1%, 0.2%, 0.3%, 0.4% or 0.5% of the activity of native GLP-1 at the GLP-1 receptor. In yet other related embodiments, the EC₅₀ of a pegylated Class 2 glucagon related peptide for glucagon receptor activation is about 10 nM or less, or at least about 0.5%, 1%, 1.5% or 2% of the activity of native glucagon at the glucagon receptor. In some embodiments, the Class 2 glucagon related peptide has less than about 1% of the activity of native glucagon at the glucagon receptor. In other embodiments, the Class 2 glucagon related peptide has less than about 10%, 5% or 1% of the activity of native GLP-1 at the GLP-1 receptor.

### Modifications

[0427] The modifications disclosed herein in reference to a Class 2 glucagon related peptide permit the manipulation of glucagon (SEQ ID NO: 1001) to create glucagon peptides that exhibit increased GIP activity, glucagon activity, and/or GLP-1 activity. Other modifications disclosed herein in reference to a Class 2 glucagon related peptide prolong the half-life, increase solubility, or increase stability of the resulting peptide. Yet other modifications disclosed herein in reference to a Class 2 glucagon related peptide have no effect on activity, or can be made without destroying the desired activity or activities. Any of the combinations in reference to a Class 2 glucagon related peptide that serve the same purpose (e.g. increasing GIP activity) can be applied individually or in combination. Any of the single or sets of combinations in reference to a Class 2 glucagon related peptide that confer enhanced properties can be applied individually or in combination, e.g. increased GIP and/or GLP-1 activity can be combined with increased half-life. In related embodiments, 1, 2, 3, 4, 5, 6 or more of the amino acid modifications may be non-conservative substitutions, additions or deletions. In some embodiments, 1, 2, 3, 4, 5, 6 or more of the amino acid modifications may be conservative substitutions.

Modifications that Affect GIP Activity

[0428] Enhanced activity at the GIP receptor is provided by an amino acid modification at position 1. For example, His at position 1 is substituted with a large, aromatic amino acid, optionally Tyr, Phe, Trp, amino-Phe, nitro-Phe, chloro-Phe, sulfo-Phe, 4-pyridyl-Ala, methyl-Tyr, or 3-amino Tyr. The combination of Tyr at position 1 with stabilization of the alpha helix within the region corresponding to amino acids 12-29 provided a Class 2 glucagon related peptide that activates the GIP receptor as well as the GLP-1 receptor and the glucagon receptor. The alpha helix structure can be stabilized by, e.g., formation of a covalent or non-covalent intramolecular bridge, or substitution and/or insertion of amino acids around positions 12-29 with an alpha helix-stabilizing amino acid (e.g., an α,α-disubstituted amino acid).

[0429] Enhanced activity at the GIP receptor is also provided by amino acid modifications at positions 27 and/or 28, and optionally at position 29. For example, the Met at position 27 is substituted with a large aliphatic amino acid, optionally Leu, the Asn at position 28 is substituted with a small aliphatic amino acid, optionally Ala, and the Thr at position 29 is substituted with a small aliphatic amino acid, optionally Gly. Substitution with LAG at positions 27-29 provides increased GIP activity relative to the native MNT sequence at those positions.

[0430] Enhanced activity at the GIP receptor is also provided by an amino acid modification at position 12. For example, position 12 is substituted with a large, aliphatic, nonpolar amino acid, optionally Ile.

[0431] Enhanced activity at the GIP receptor is also provided by an amino acid modification at positions 17 and/or 18. For example, position 17 is substituted with a polar residue, optionally Gln, and position 18 is substituted with a small aliphatic amino acid, optionally Ala. A substitution with QA at positions 17 and 18 provides increased GIP activity relative to the native RR sequence at those positions.

[0432] Increased activity at the GIP receptor is provided by modifications that permit formation of an intramolecular bridge between amino acid side chains at positions from 12 to 29. For example, an intramolecular bridge can be formed by a covalent bond between the side chains of two amino acids at positions i and i+4 or between positions j and j+3, or between positions k and k+7. In exemplary embodiments, the bridge is between positions 12 and 16, 16 and 20, 20 and 24, 24 and 28, or 17 and 20. In other embodiments, non-covalent interactions such as salt bridges can be formed between positively and negatively charged amino acids at these positions.

[0433] Any of the modifications described above which increase GIP receptor activity can be applied individually or in combination. Combinations of the modifications that increase GIP receptor activity generally provide higher GIP activity than any of such modifications taken alone.

Modifications that Affect Glucagon Activity

[0434] In some embodiments, enhanced glucagon potency is provided by an amino acid modification at position 16 of native glucagon (SEQ ID NO: 1001). By way of nonlimiting example, such enhanced potency can be provided by substituting the naturally occurring serine at position 16 with glutamic acid or with another negatively charged amino acid having a side chain with a length of 4 atoms, or alternatively with any one of glutamine, homoglutamic acid, or homocysteic acid, or a charged amino acid having a side chain containing at least one heteroatom, (e.g. N, O, S, P) and with a side chain length of about 4 (or 3-5) atoms. In some embodiments the glucagon peptide retains its original selectivity for the glucagon receptor relative to the GLP-1 receptors.

[0435] Glucagon receptor activity can be reduced by an amino acid modification at position 3, e.g. substitution of the naturally occurring glutamine at position 3, with an acidic, basic, or a hydrophobic amino acid. For example substitution at position 3 with glutamic acid, ornithine, or norleucine substantially reduces or destroys glucagon receptor activity.

[0436] Maintained or enhanced activity at the glucagon receptor may be achieved by modifying the Gln at position 3 with a glutamine analog, as described herein. For example, glucagon agonists can comprise the amino acid sequence of any of SEQ ID NOs: 1243-1248, 1250, 1251, and 1253-1256.

[0437] Restoration of glucagon activity which has been reduced by amino acid modifications at positions 1 and 2 is provided by modifications that that stabilize the alpha helix structure of the C-terminal portion (amino acids 12-29) of the glucagon peptide or analog thereof. For example, an intramolecular bridge can be formed by a covalent bond between the side chains of two amino acids at positions i and i+4 or between positions j and j+3, or between positions k and k+7. In other embodiments, non-covalent interactions such as salt bridges can be formed between positively and negatively charged amino acids at these positions. In yet other embodiments, one or more α,α-disubstituted amino acids are inserted or substituted into this C-terminal portion (amino acids 12-29) at positions that retain the desired activity. For example, one, two, three or all of positions 16, 20, 21 or 24 are substituted with an α,α-disubstituted amino acid, e.g., Aib.

Modifications that Affect GLP-1 Activity

[0438] Enhanced activity at the GLP-1 receptor is provided by replacing the carboxylic acid of the C-terminal amino acid with a charge-neutral group, such as an amide or ester.

[0439] Enhanced activity at the GLP-1 receptor is also provided by stabilizing the alpha-helix structure in the C-terminal portion of glucagon (around amino acids 12-29), e.g., through formation of an intramolecular bridge between the side chains of two amino acids, or substitution and/or insertion of amino acids around positions 12-29 with an alpha helix-stabilizing amino acid (e.g., an α,α-disubstituted amino acid), as further described herein. In exemplary embodiments, the side chains of the amino acid pairs 12 and 16, 13 and 17, 16 and 20, 17 and 21, 20 and 24 or 24 and 28 (amino acid pairs in which i=12, 16, 20, or 24) are linked to one another and thus stabilize the glucagon alpha helix. In some embodiments, the bridge or linker is about 8 (or about 7-9) atoms in length, particularly when the bridge is between positions i and i+4. In some embodiments, the bridge or linker is about 6 (or about 5-7) atoms in length, particularly when the bridge is between positions j and j+3.

[0440] In some embodiments, intramolecular bridges are formed by (a) substituting the naturally occurring serine at position 16 with glutamic acid or with another negatively charged amino acid having a side chain with a length of 4 atoms, or alternatively with any one of glutamine, homoglutamic acid, or homocysteic acid, or a charged amino acid having a side chain containing at least one heteroatom, (e.g. N, O, S, P) and with a side chain length of about 4 (or 3-5) atoms, and (b) substituting the naturally occurring glutamine at position 20 with another hydrophilic amino acid having a side chain that is either charged or has an ability to hydrogen-bond, and is at least about 5 (or about 4-6) atoms in length, for example, lysine, citrulline, arginine, or ornithine. The side chains of such amino acids at positions 16 and 20 can form a salt bridge or can be covalently linked. In some embodiments the two amino acids are bound to one another to form a lactam ring.

[0441] In some embodiments, stabilization of the alpha helix structure in the C-terminal portion of the glucagon peptide is achieved through the formation of an intramolecular bridge other than a lactam bridge. For example, suitable covalent bonding methods include any one or more of olefin metathesis, lanthionine-based cyclization, disulfide bridge or modified sulfur-containing bridge formation, the use of α,ω-diaminoalkane tethers, the formation of metal-atom bridges, and other means of peptide cyclization are used to stabilize the alpha helix.

[0442] In yet other embodiments, one or more α,α-disubstituted amino acids are inserted or substituted into this C-terminal portion (amino acids 12-29) at positions that retain the desired activity. For example, one, two, three or all of positions 16, 20, 21 or 24 are substituted with an α,α-disubstituted amino acid, e.g., Aib.

[0443] Increased activity at the GLP-1 receptor is provided by an amino acid modification at position 20 as described herein.

[0444] Increased activity at the GLP-1 receptor is provided by adding GPSSGAPPPS (SEQ ID NO: 1095) or XGPSSGAPPPS (SEQ ID NO: 1096) to the C-terminus. GLP-1 activity in such analogs can be further increased by modifying the amino acid at position 18, 28 or 29, or at position 18 and 29, as described herein.

[0445] A further modest increase in GLP-1 potency is provided by modifying the amino acid at position 10 to be a large, aromatic amino acid residue, optionally Trp.

[0446] Reduced activity at the GLP-1 receptor is provided, e.g., by an amino acid modification at position 7 as described herein.

[0447] Potency at the GLP-1 receptor can be further enhanced by an alanine substitution for the native arginine at position 18.

[0448] Any of the modifications described above in reference to a Class 2 glucagon related peptide which increase GLP-1 receptor activity can be applied individually or in combination. Combinations of the modifications that increase GLP-1 receptor activity generally provide higher GLP-1 activity than any of such modifications taken alone. For example, the invention provides glucagon peptides that comprise modifications at position 16, at position 20, and at the C-terminal carboxylic acid group, optionally with a covalent bond between the amino acids at positions 16 and 20; glucagon peptides that comprise modifications at position 16 and at the C-terminal carboxylic acid group; glucagon peptides that comprise modifications at positions 16 and 20, optionally with a covalent bond between the amino acids at positions 16 and 20; and glucagon peptides that comprise modifications at position 20 and at the C-terminal carboxylic acid group.

Modifications that Improve DPP-IV Resistance

[0449] Modifications at position 1 and/or 2 can increase the peptide's resistance to dipeptidyl peptidase IV (DPP IV) cleavage. For example, position 1 and/or position 2 may be substituted with a DPP-IV resistant amino acid as described herein. In some embodiments, the amino acid at position 2 is substituted with N-methyl alanine.

[0450] It was observed that modifications at position 2 (e.g. Aib at position 2) and in some cases modifications at position 1 (e.g., DMIA at position 1) may reduce glucagon activity, sometimes significantly; surprisingly, this reduction in glucagon activity can be restored by stabilizing the alpha-helix structure in the C-terminal portion of glucagon (around amino acids 12-29), e.g., through formation of a covalent bond between the side chains of two amino acids, as described herein. In some embodiments, the covalent bond is between amino acids at positions “i” and “i+4”, or positions “j” and “j+3”, e.g., between positions 12 and 16, 16 and 20, 20 and 24, 24 and 28, or 17 and 20. In exemplary embodiments, this covalent bond is a lactam bridge between a glutamic acid at position 16 and a lysine at position 20. In some embodiments, this covalent bond is an intramolecular bridge other than a lactam bridge, as described herein.

Modifications that Reduce Degradation

[0451] In yet further exemplary embodiments, any of the Class 2 glucagon related peptides can be further modified to improve stability by modifying the amino acid at position 15 and/or 16 of SEQ ID NO: 1001 to reduce degradation of the peptide over time, especially in acidic or alkaline buffers. Such modifications reduce cleavage of the Asp15-Ser16 peptide bond. In exemplary embodiments, the amino acid modification at position 15 is a deletion or substitution of Asp with glutamic acid, homoglutamic acid, cysteic acid or homocysteic acid. In other exemplary embodiments, the amino acid modification at position 16 is a deletion or substitution of Ser with Thr or Aib. In other exemplary embodiments, Ser at position 16 is substituted with glutamic acid or with another negatively charged amino acid having a side chain with a length of 4 atoms, or alternatively with any one of glutamine, homoglutamic acid, or homocysteic acid.

[0452] In some embodiments, the methionine residue present at position 27 of the native peptide is modified, e.g. by deletion or substitution. Such modifications may prevent oxidative degradation of the peptide. In some embodiments, the Met at position 27 is substituted with leucine, isoleucine or norleucine. In some specific embodiments, Met at position 27 is substituted with leucine or norleucine.

[0453] In some embodiments, the Gln at position 20 and/or 24 is modified, e.g. by deletion or substitution. Such modifications can reduce degradation that occurs through deamidation of Gln. In some embodiments, the Gln at position 20 and/or 24 is substituted with Ser, Thr, Ala or Aib. In some embodiments the Gln at position 20 and/or 24 is substituted with Lys, Arg, Orn, or Citrulline.

[0454] In some embodiments, the Asp at position 21 is modified, e.g. by deletion or substitution. Such modifications can reduce degradation that occurs through dehydration of Asp to form a cyclic succinimide intermediate followed by isomerization to iso-aspartate. In some embodiments, position 21 is substituted with Glu, homoglutamic acid or homocysteic acid. In some specific embodiments, position 21 is substituted with Glu.

### Stabilization of the Alpha Helix Structure

[0455] Stabilization of the alpha-helix structure in the C-terminal portion of the Class 2 glucagon related peptide (around amino acids 12-29) provides enhanced GLP-1 and/or GIP activity and restores glucagon activity which has been reduced by amino acid modifications at positions 1 and/or 2. The alpha helix structure can be stabilized by, e.g., formation of a covalent or non-covalent intramolecular bridge, or substitution and/or insertion of amino acids around positions 12-29 with an alpha helix-stabilizing amino acid (e.g., an α,α-disubstituted amino acid). Stabilization of the alpha-helix structure of a GIP agonist may be accomplished as described herein.

### Acylation and Alkylation

[0456] In accordance with some embodiments, the glucagon peptides disclosed herein are modified to comprise an acyl group or alkyl group, e.g., an acyl or alkyl group which is non-native to a naturally-occurring amino acid as described herein. Acylation or alkylation can increase the half-life of the glucagon peptides in circulation. Acylation or alkylation can advantageously delay the onset of action and/or extend the duration of action at the glucagon and/or GLP-1 receptors and/or improve resistance to proteases such as DPP-IV and/or improve solubility. Activity at the glucagon and/or GLP-1 and/or GIP receptors of the glucagon peptide may be maintained after acylation. In some embodiments, the potency of the acylated glucagon peptides is comparable to the unacylated versions of the glucagon peptides. Class 2 glucagon related peptides may be acylated or alkylated at the same amino acid position where a hydrophilic moiety is linked, or at a different amino acid position, as described herein.

[0457] In some embodiments, the invention provides a glucagon peptide modified to comprise an acyl group or alkyl group covalently linked to the amino acid at position 10 of the glucagon peptide. The glucagon peptide may further comprise a spacer between the amino acid at position 10 of the glucagon peptide and the acyl group or alkyl group. In some embodiments, the acyl group is a fatty acid or bile acid, or salt thereof, e.g. a C4 to C30 fatty acid, a C8 to C24 fatty acid, cholic acid, a C4 to C30 alkyl, a C8 to C24 alkyl, or an alkyl comprising a steroid moiety of a bile acid. The spacer is any moiety with suitable reactive groups for attaching acyl or alkyl groups. In exemplary embodiments, the spacer comprises an amino acid, a dipeptide, a tripeptide, a hydrophilic bifunctional, or a hydrophobic bifunctional spacer. In some embodiments, the spacer is selected from the group consisting of: Trp, Glu, Asp, Cys and a spacer comprising NH₂(CH₂CH₂O)ₙ(CH₂)ₘCOOH, wherein m is any integer from 1 to 6 and n is any integer from 2 to 12. Such acylated or alkylated glucagon peptides may also further comprise a hydrophilic moiety, optionally a polyethylene glycol. Any of the foregoing glucagon peptides may comprise two acyl groups or two alkyl groups, or a combination thereof.

### Conjugates and Fusions

[0458] The GIP agonist can be linked, optionally via covalent bonding and optionally via a linker, to a conjugate moiety as described herein.

[0459] In other embodiments, the second peptide is XGPSSGAPPPS (SEQ ID NO: 1096), wherein X is selected from one of the 20 common amino acids, e.g., glutamic acid, aspartic acid or glycine. In some embodiments X represents an amino acid, for example Cys, that further comprises a hydrophilic moiety covalently linked to the side chain of that amino acid. Such C-terminal extensions improve solubility and also can improve GIP or GLP-1 activity. In some embodiments wherein the glucagon peptide further comprises a carboxy terminal extension, the carboxy terminal amino acid of the extension ends in an amide group or an ester group rather than a carboxylic acid.

[0460] In some embodiments, e.g., in glucagon peptides which comprise the C-terminal extension, the threonine at position 29 of the native glucagon peptide is replaced with a glycine. For example, a glucagon peptide having a glycine substitution for threonine at position 29 and comprising the C-terminal extension of GPSSGAPPPS (SEQ ID NO: 1095) is four times as potent at the GLP-1 receptor as native glucagon modified to comprise the same C-terminal extension. This T29G substitution can be used in conjunction with other modifications disclosed herein to enhance the affinity of the glucagon peptides for the GLP-1 receptor. For example, the T29G substitution can be combined with the S16E and N20K amino acid substitutions, optionally with a lactam bridge between amino acids 16 and 20, and optionally with addition of a PEG chain as described herein.

[0461] In some embodiments an amino acid is added to the C-terminus, and the additional amino acid is selected from the group consisting of glutamic acid, aspartic acid and glycine.

Modifications that Enhance Solubility

[0462] In another embodiment, the solubility of any of the glucagon peptides can be improved by amino acid substitutions and/or additions that introduce a charged amino acid into the C-terminal portion of the peptide, preferably at a position C-terminal to position 27 of SEQ ID NO: 1001. Optionally, one, two or three charged amino acids may be introduced within the C-terminal portion, preferably C-terminal to position 27. In some embodiments the native amino acid(s) at positions 28 and/or 29 are substituted with one or two charged amino acids, and/or in a further embodiment one to three charged amino acids are also added to the C-terminus of the peptide. In exemplary embodiments, one, two or all of the charged amino acids are negatively charged. In some embodiments, the negatively charged (acidic amino acid) is aspartic acid or glutamic acid.

[0463] Additional modifications, e.g. conservative substitutions, may be made to the glucagon peptide that still allow it to retain GIP activity (and optionally GLP-1 activity and/or glucagon activity).

### Other Modifications

[0464] Any of the modifications described above in reference to a Class 2 peptide which increase or decrease GIP activity, which increase or decrease glucagon receptor activity, and which increase GLP-1 receptor activity can be applied individually or in combination. Any of the modifications described above in reference to a Class 2 glucagon related peptide can also be combined with other modifications that confer other desirable properties, such as increased solubility and/or stability and/or duration of action, as described herein with regard to Class 2 glucagon related peptides. Alternatively, any of the modifications described above in reference to Class 2 glucaton related peptides can be combined with other modifications described herein in reference to Class 2 glucagon related peptides that do not substantially affect solubility or stability or activity. Exemplary modifications include but are not limited to:

[0465] (A) Improving solubility, for example, by introducing one, two, three or more charged amino acid(s) to the C-terminal portion of native glucagon, preferably at a position C-terminal to position 27. Such a charged amino acid can be introduced by substituting a native amino acid with a charged amino acid, e.g. at positions 28 or 29, or alternatively by adding a charged amino acid, e.g. after position 27, 28 or 29. In exemplary embodiments, one, two, three or all of the charged amino acids are negatively charged. In other embodiments, one, two, three or all of the charged amino acids are positively charged. Such modifications increase solubility, e.g. provide at least 2-fold, 5-fold, 10-fold, 15-fold, 25-fold, 30-fold or greater solubility relative to native glucagon at a given pH between about 5.5 and 8, e.g., pH 7, when measured after 24 hours at 25° C.

[0466] (B) Increasing solubility and duration of action or half-life in circulation by addition of a hydrophilic moiety such as a polyethylene glycol chain, as described herein, e.g. at position 16, 17, 20, 21, 24 or 29, within a C-terminal extension, or at the C-terminal amino acid of the peptide,

[0467] (C) Increasing solubility and/or duration of action or half-life in circulation and/or delaying the onset of action by acylation or alkylation of the glucagon peptide, as described herein;

[0468] (D) Increasing duration of action or half-life in circulation through introducing resistance to dipeptidyl peptidase IV (DPP IV) cleavage by modification of the amino acid at position 1 or 2 as described herein.

[0469] (E) Increasing stability by modification of the Asp at position 15, for example, by deletion or substitution with glutamic acid, homoglutamic acid, cysteic acid or homocysteic acid. Such modifications can reduce degradation or cleavage at a pH within the range of 5.5 to 8, for example, retaining at least 75%, 80%, 90%, 95%, 96%, 97%, 98% or 99%, up to 100% of the original peptide after 24 hours at 25° C. Such modifications reduce cleavage of the peptide bond between Asp15-Ser16.

[0470] (F) Increasing stability by modification of the Ser at position 16, for example by substitution with Thr or Aib. Such modifications also reduce cleavage of the peptide bond between Asp15-Ser16.

[0471] (G) Increasing stability by modification of the methionine at position 27, for example, by substitution with leucine or norleucine. Such modifications can reduce oxidative degradation. Stability can also be increased by modification of the Gln at position 20 or 24, e.g. by substitution with Ser, Thr, Ala or Aib. Such modifications can reduce degradation that occurs through deamidation of Gln. Stability can be increased by modification of Asp at position 21, e.g. by substitution with Glu. Such modifications can reduce degradation that occurs through dehydration of Asp to form a cyclic succinimide intermediate followed by isomerization to iso-aspartate.

[0472] (H) Non-conservative or conservative substitutions, additions or deletions that do not substantially affect activity, for example, conservative substitutions at one or more of positions 2, 5, 9, 10, 11, 12, 13, 14, 15, 16, 17, 18, 19, 20, 21, 24, 27, 28 or 29; substitution of one or more of these positions with Ala; deletion of amino acids at one or more of positions 27, 28 or 29; or deletion of amino acid 29 optionally combined with a C-terminal amide or ester in place of the C-terminal carboxylic acid group; substitution of Lys at position 12 with Arg; substitution of Tyr at position 10 with Val or Phe;

[0473] Preservation of activity after pegylation is provided by the addition of GPSSGAPPPS (SEQ ID NO: 1095) to the C-terminus

[0474] Some positions of the native glucagon peptide can be modified while retaining at least some of the activities of the parent peptide. Accordingly, applicants anticipate that one or more of the amino acids located at positions at positions 2, 5, 10, 11, 12, 13, 14, 17, 18, 19, 20, 21, 24, 27, 28 or 29 can be substituted with an amino acid different from that present in the native glucagon peptide, and still retain activity at the glucagon receptor.

[0475] In some embodiments, position 18 is substituted with an amino acid selected from the group consisting of Ala, Ser, or Thr. In some embodiments the amino acid at position 20 is substituted with Ser, Thr, Lys, Arg, Orn, Citrulline or Aib. In some embodiments, position 21 is substituted with Glu, homoglutamic acid or homocysteic acid. In some embodiments, the glucagon peptide comprises 1 to 10 amino acid modifications selected from positions 16, 17, 18, 20, 21, 23, 24, 27, 28 and 29. In exemplary embodiments, the modifications are one or more amino acid substitutions selected from the group consisting of Gln17, Ala18, Glu21, Ile23, Ala24, Val27 and Gly29. In some embodiments, 1 to 2 amino acids selected from positions 17-26 differ from the parent peptide. In other embodiments, 1 to 2 amino acids selected from positions 17-22 differ from the parent peptide. In yet other embodiments, the modifications are Gln17, Ala18, Glu21, Ile23 and Ala24.

[0476] In some embodiments, one or more amino acids is added to the carboxy terminus of the glucagon peptide. The amino acid is typically selected from one of the 20 common amino acids, and in some embodiments the amino acid has an amide group in place of the carboxylic acid of the native amino acid. In exemplary embodiments the added amino acid is selected from the group consisting of glutamic acid and aspartic acid and glycine.

Other Modifications that do not Destroy Activity Include W10 or R20.

[0477] In some embodiments, the Class 2 glucagon related peptides disclosed herein are modified by truncation of the C-terminus by one or two amino acid residues yet retain similar activity and potency at the glucagon, GLP-1 and/or GIP receptors. In this regard, the amino acid at position 29 and/or 28 can be deleted.

### Exemplary Embodiments

[0478] In accordance with some embodiments of the invention, the analog of glucagon (SEQ ID NO: 1001) having GIP agonist activity comprises SEQ ID NO: 1001 with (a) an amino acid modification at position 1 that confers GIP agonist activity, (b) a modification which stabilizes the alpha helix structure of the C-terminal portion (amino acids 12-29) of the analog, and (c) optionally, 1 to 10 (e.g., 1, 2, 3, 4, 5, 6, 7, 8, 9, 10) further amino acid modifications. In some embodiments, the analog exhibits at least about 1% activity of native GIP at the GIP receptor or any other activity level at the GIP receptor described herein.

[0479] In certain embodiments, the modification which stabilizes the alpha helix structure is one which provides or introduces an intramolecular bridge, including, for example, a covalent intramolecular bridge, such as any of those described herein. The covalent intramolecular bridge in some embodiments is a lactam bridge. The lactam bridge of the analog of these embodiments can be a lactam bridge as described herein. See, e.g., the teachings of lactam bridges under the section “Stabilization of the Alpha Helix Structure.” For example, the lactam bridge may be one which is between the side chains of amino acids at positions i and i+4 or between the side chains of amino acids at positions j and j+3, wherein i is 12, 13, 16, 17, 20 or 24, and wherein j is 17. In certain embodiments, the lactam bridge can be between the amino acids at positions 16 and 20, wherein one of the amino acids at positions 16 and 20 is substituted with Glu and the other of the amino acids at positions 16 and 20 is substituted with Lys.

[0480] In alternative embodiments, the modification which stabilizes the alpha helix structure is the introduction of one, two, three, or four α,α-disubstituted amino acids at position(s) 16, 20, 21, and 24 of the analog. In some embodiments, the α,α-disubstituted amino acid is Aib. In certain aspects, the α,α-disubstituted amino acid (e.g., Aib) is at position 20 and the amino acid at position 16 is substituted with a positive-charged amino acid, such as, for example, an amino acid of Formula IV, which is described herein. The amino acid of Formula IV may be homoLys, Lys, Orn, or 2,4-diaminobutyric acid (Dab).

[0481] In specific aspects of the invention, the amino acid modification at position 1 is a substitution of His with an amino acid lacking an imidazole side chain, e.g. a large, aromatic amino acid (e.g., Tyr).

[0482] In certain aspects, the analog of glucagon comprises amino acid modifications at one, two or all of positions 27, 28 and 29. For example, the Met at position 27 can be substituted with a large aliphatic amino acid, optionally Leu, the Asn at position 28 can be substituted with a small aliphatic amino acid, optionally Ala, the Thr at position 29 can be substituted with a small aliphatic amino acid, optionally Gly, or a combination of two or three of the foregoing. In specific embodiments, the analog of glucagon comprises Leu at position 27, Ala at position 28, and Gly or Thr at position 29.

[0483] In certain embodiments of the invention, the analog of glucagon comprises an extension of 1 to 21 amino acids C-terminal to the amino acid at position 29. The extension can comprise the amino acid sequence of SEQ ID NO: 1095 or 1096, for instance. Additionally or alternatively, the analog of glucagon can comprise an extension of which 1-6 amino acids of the extension are positive-charged amino acids. The positive-charged amino acids may be amino acids of Formula IV, including, but not limited to Lys, homoLys, Orn, and Dab.

[0484] The analog of glucagon in some embodiments is acylated or alkylated as described herein. For instance, the acyl or alkyl group may be attached to the analog of glucagon, with or without a spacer, at position 10 or 40 of the analog, as further described herein. The analog may additionally or alternatively be modified to comprise a hydrophilic moiety as further described herein. Furthermore, in some embodiments, the analog comprises any one or a combination of the following modifications:

[0485] (a) Ser at position 2 substituted with D-Ser, Ala, D-Ala, Gly, N-methyl-Ser, Aib, Val, or α-amino-N-butyric acid;

[0486] (b) Tyr at position 10 substituted with Trp, Lys, Orn, Glu, Phe, or Val:

[0487] (c) Linkage of an acyl group to a Lys at position 10;

[0488] (d) Lys at position 12 substituted with Arg or Ile;

[0489] (e) Ser at position 16 substituted with Glu, Gln, homoglutamic acid, homocysteic acid, Thr, Gly, or Aib;

[0490] (f) Arg at position 17 substituted with Gln;

[0491] (g) Arg at position 18 substituted with Ala, Ser, Thr, or Gly;

[0492] (h) Gln at position 20 substituted with Ser, Thr, Ala, Lys, Citrulline, Arg, Orn, or Aib;

[0493] (i) Asp at position 21 substituted with Glu, homoglutamic acid, homocysteic acid;

[0494] (j) Val at position 23 substituted with Ile;

[0495] (k) Gln at position 24 substituted with Asn, Ser, Thr, Ala, or Aib;

[0496] (l) and a conservative substitution at any of positions 2 5, 9, 10, 11, 12. 13, 14, 15, 16, 8 19 20, 21. 24, 27, 28, and 29.

[0497] In exemplary embodiments, the analog of glucagon (SEQ ID NO: 1001) having GIP agonist activity comprises the following modifications:

[0498] (a) an amino acid modification at position 1 that confers GIP agonist activity,

[0499] (b) a lactam bridge between the side chains of amino acids at positions i and i+4 or between the side chains of amino acids at positions j and j+3, wherein i is 12, 13, 16, 17, 20 or 24, and wherein j is 17,

[0500] (c) amino acid modifications at one, two or all of positions 27, 28 and 29, e.g., amino acid modifications at position 27 and/or 28, and

[0501] (d) 1-9 or 1-6 further amino acid modifications, e.g. 1, 2, 3, 4, 5, 6, 7, 8 or 9 further amino acid modifications,

[0502] and the EC₅₀ of the analog for GIP receptor activation is about 10 nM or less.

[0503] The lactam bridge of the analog of these embodiments can be a lactam bridge as described herein. See, e.g., the teachings of lactam bridges under the section “Stabilization of the Alpha Helix Structure.” For example, the lactam bridge can be between the amino acids at positions 16 and 20, wherein one of the amino acids at positions 16 and 20 is substituted with Glu and the other of the amino acids at positions 16 and 20 is substituted with Lys.

[0504] In accordance with these embodiments, the analog can comprise, for example, the amino acid sequence of any of SEQ ID NOs: 1005-1094.

[0505] In other exemplary embodiments, the analog of glucagon (SEQ ID NO: 1001) having GIP agonist activity comprises the following modifications:

[0506] (a) an amino acid modification at position 1 that confers GIP agonist activity,

[0507] (b) one, two, three, or all of the amino acids at positions 16, 20, 21, and 24 of the analog is substituted with an α,α-disubstituted amino acid,

[0508] (c) amino acid modifications at one, two or all of positions 27, 28 and 29, e.g., amino acid modifications at position 27 and/or 28, and

[0509] (d) 1-9 or 1-6 further amino acid modifications, e.g. 1, 2, 3, 4, 5, 6, 7, 8 or 9 further amino acid modifications,

[0510] and the EC₅₀ of the analog for GIP receptor activation is about 10 nM or less.

[0511] The α,α-disubstituted amino acid of the analog of these embodiments can be any α,α-disubstituted amino acid, including, but not limited to, amino iso-butyric acid (Aib), an amino acid disubstituted with the same or a different group selected from methyl, ethyl, propyl, and n-butyl, or with a cyclooctane or cycloheptane (e.g., 1-aminocyclooctane-1-carboxylic acid). In certain embodiments, the α,α-disubstituted amino acid is Aib. In certain embodiments, the amino acid at position 20 is substituted with an α,α-disubstituted amino acid, e.g., Aib.

[0512] In accordance with these embodiments, the analog can comprise, for example, the amino acid sequence of any of SEQ ID NOs: 1099-1141, 1144-1164, 1166-1169, and 1173-1178.

[0513] In yet other exemplary embodiments, the analog of glucagon (SEQ ID NO: 1001) having GIP agonist activity comprises the following modifications:
[0514] (a) an amino acid modification at position 1 that confers GIP agonist activity,
[0515] (b) an amino acid substitution of Ser at position 16 with an amino acid of Formula IV:

[chemical structure]

[0516] wherein n is 1 to 16, or 1 to 10, or 1 to 7, or 1 to 6, or 2 to 6, each of R1 and R2 is independently selected from the group consisting of H, C1-C18 alkyl, (C1-C18 alkyl)OH, (C1-C18 alkyl)NH2, (C1-C18 alkyl)SH, (C0-C4 alkyl)(C3-C6)cycloalkyl, (C0-C4 alkyl)(C2-C5 heterocyclic), (C0-C4 alkyl)(C6-C10 aryl)R7, and (C1-C4 alkyl)(C3-C9 heteroaryl), wherein R7 is H or OH, and the side chain of the amino acid of Formula IV comprises a free amino group,

[0517] (c) an amino acid substitution of the Gln at position 20 with an alpha, alpha-disubstituted amino acid,

[0518] (d) amino acid modifications at one, two or all of positions 27, 28 and 29, e.g., amino acid modifications at position 27 and/or 28, and

[0519] (e) 1-9 or 1-6 further amino acid modifications, e.g. 1, 2, 3, 4, 5, 6, 7, 8 or 9 further amino acid modifications,

[0520] and the EC₅₀ of the analog for GIP receptor activation is about 10 nM or less.

[0521] The amino acid of Formula IV of the analog of these embodiments may be any amino acid, such as, for example, the amino acid of Formula IV, wherein n is 1, 2, 3, 4, 5, 6, 7, 8, 9, 10, 11, 12, 13, 14, 15, or 16. In certain embodiments, n is 2, 3, 4, or 5, in which case, the amino acid is Dab, Orn, Lys, or homoLys respectively.

[0522] The alpha, alpha-disubstituted amino acid of the analog of these embodiments may be any alpha, alpha-disubstituted amino acid, including, but not limited to, amino iso-butyric acid (Aib), an amino acid disubstituted with the same or a different group selected from methyl, ethyl, propyl, and n-butyl, or with a cyclooctane or cycloheptane (e.g., 1-aminocyclooctane-1-carboxylic acid). In certain embodiments, the alpha, alpha-disubstituted amino acid is Aib.

[0523] In accordance with these embodiments, the analog can comprise, for example, the amino acid sequence of any of SEQ ID NOs: 1099-1165.

[0524] In yet other exemplary embodiments, the analog of glucagon (SEQ ID NO: 1001) having GIP agonist activity comprises:

[0525] (a) an amino acid modification at position 1 that confers GIP agonist activity, and

[0526] (b) an extension of about 1 to about 21 amino acids C-terminal to the amino acid at position 29, wherein at least one of the amino acids of the extension is acylated or alkylated,

[0527] wherein the EC₅₀ of the analog for GIP receptor activation is about 10 nM or less.

[0528] In some embodiments, the acylated or alkylated amino acid is an amino acid of Formula I, II, or III. In more specific embodiments, the amino acid of Formula I is Dab, Orn, Lys, or homoLys. Also, in some embodiments, the extension of about 1 to about 21 amino acids comprises the amino acid sequence of GPSSGAPPPS (SEQ ID NO: 1095) or XGPSSGAPPPS (SEQ ID NO: 1096), wherein X is any amino acid, or GPSSGAPPPK (SEQ ID NO: 1170) or XGPSSGAPPPK (SEQ ID NO: 1171) or XGPSSGAPPPSK (SEQ ID NO: 1172), wherein X is Gly or a small, aliphatic or non-polar or slightly polar amino acid. In some embodiments, the about 1 to about 21 amino acids may comprise sequences containing one or more conservative substitutions relative to SEQ ID NO: 1095, 1096, 1170, 1171 or 1172. In some embodiments, the acylated or alkylated amino acid is located at position 37, 38, 39, 40, 41, 42, or 43 of the C-terminally-extended analog. In certain embodiments, the acylated or alkylated amino acid is located at position 40 of the C-terminally extended analog.

[0529] In some embodiments, the analog having GIP agonist activity further comprises amino acid modifications at one, two or all of positions 27, 28 and 29, e.g., amino acid modifications at position 27 and/or 28.

[0530] In any of the above exemplary embodiments, the amino acid modification at position 1 that confers GIP agonist activity can be a substitution of His with an amino acid lacking an imidazole side chain. The amino acid modification at position 1 can, for example, be a substitution of His with a large, aromatic amino acid. In some embodiments, the large, aromatic amino acid is any of those described herein, including, for example, Tyr.

[0531] In certain aspects, the analog does not comprise an amino acid modification at position 1 which modification confers GIP agonist activity. In some aspects, the amino acid at position 1 is not a large, aromatic amino acid, e.g., Tyr. In some embodiments, the amino acid at position 1 is an amino acid comprising an imidazole ring, e.g., His, analogs of His. In certain embodiments, the analog is not any of the compounds disclosed in International Patent Application Publication No. WO 2010/011439. In certain aspects, the analog comprises the amino acid sequence of any of SEQ ID NOs: 1263-1275.

[0532] Also, with regard to the above exemplary embodiments, amino acid modifications at one, two, or all of positions 27, 28, and 29 can be any of the modifications at these positions described herein. For example, the Met at position 27 can be substituted with a large aliphatic amino acid, optionally Leu, the Asn at position 28 can be substituted with a small aliphatic amino acid, optionally Ala, and/or the Thr at position 29 can be substituted with a small aliphatic amino acid, optionally Gly. Alternatively, the analog can comprise such amino acid modifications at position 27 and/or 28.

[0533] The analog of the above exemplary embodiments can further comprise 1-9 or 1-6 further, additional amino acid modifications, e.g. 1, 2, 3, 4, 5, 6, 7, 8 or 9 further amino acid modifications, such as, for example, any of the modifications described herein which increase or decrease the activity at any of the GIP, GLP-1, and glucagon receptors, improve solubility, improve duration of action or half-life in circulation, delay the onset of action, or increase stability. The analog can further comprise, for example, an amino acid modification at position 12, optionally, a substitution with Ile, and/or amino acid modifications at positions 17 and 18, optionally substitution with Q at position 17 and A at position 18, and/or an addition of GPSSGAPPPS (SEQ ID NO: 1095) or XGPSSGAPPPS (SEQ ID NO: 1096), or sequences containing one or more conservative substitutions relative to SEQ ID NO: 1095 or 1096, to the C-terminus. The analog can comprise one or more of the following modifications:

[0534] (i) Ser at position 2 substituted with D-Ser, Ala, D-Ala, Gly, N-methyl-Ser, Aib, Val, or α-amino-N-butyric acid;

[0535] (ii) Tyr at position 10 substituted with Trp, Lys, Orn, Glu, Phe, or Val;

[0536] (iii) Linkage of an acyl group to a Lys at position 10;

[0537] (iv) Lys at position 12 substituted with Arg;

[0538] (v) Ser at position 16 substituted with Glu, Gln, homoglutamic acid, homocysteic acid, Thr, Gly, or Aib;

[0539] (vi) Arg at position 17 substituted with Gln;

[0540] (vii) Arg at position 18 substituted with Ala, Ser, Thr, or Gly;

[0541] (viii) Gln at position 20 substituted with Ala, Ser, Thr, Lys, Citrulline, Arg, Orn, or Aib;

[0542] (ix) Asp at position 21 substituted with Glu, homoglutamic acid, homocysteic acid;

[0543] (x) Val at position 23 substituted with Ile;

[0544] (xi) Gln at position 24 substituted with Asn, Ala, Ser, Thr, or Aib; and

[0545] (xii) a conservative substitution at any of positions 2, 5, 9, 10, 11, 12, 13, 14, 15, 16, 17, 18, 19, 20, 21, 24, 27, 28, and 29.

[0546] The analog in some embodiments comprise a combination of the modifications (i) through (xii). Alternatively or additionally, the analog can comprise an amino acid modification at position 3 (e.g., an amino acid substitution of Gln with Glu), wherein the analog has less than 1% of the activity of glucagon at the glucagon receptor. Alternatively or additionally, the analog can comprise an amino acid modification at position 7 (e.g., an amino acid substitution of Thr with an amino acid lacking a hydroxyl group, e.g., Abu or Ile), wherein the analog has less than about 10% of the activity of GLP-1 at the GLP-1 receptor.

[0547] With regard to the exemplary embodiments, the analog can be covalently linked to a hydrophilic moiety. In some embodiments, the analog is covalently linked to the hydrophilic moiety at any of amino acid positions 16, 17, 20, 21, 24, 29, 40, or the C-terminus In certain embodiments, the analog comprises a C-terminal extension (e.g., an amino acid sequence of SEQ ID NO: 1095) and an addition of an amino acid comprising the hydrophilic moiety, such that the hydrophilic moiety is covalently linked to the analog at position 40.

[0548] In some embodiments, the hydrophilic moiety is covalently linked to a Lys, Cys, Orn, homocysteine, or acetyl-phenylalanine of the analog. The Lys, Cys, Orn, homocysteine, or acetyl-phenylalanine may be an amino acid that is native to the glucagon sequence (SEQ ID NO: 1001) or it may be an amino acid which is replacing a native amino acid of SEQ ID NO: 1001. In some embodiments, wherein the hydrophilic moiety is attached to a Cys, the linkage to the hydrophilic moiety can comprise the structure

[chemical structure]

[0549] With regard to the analogs comprising a hydrophilic moiety, the hydrophilic moiety may be any of those described herein. See, e.g., the teachings under the section “Linkage of hydrophilic moieties.” In some embodiments, the hydrophilic moiety is a polyethylene glycol (PEG). The PEG in certain embodiments has a molecular weight of about 1,000 Daltons to about 40,000 Daltons, e.g., about 20,000 Daltons to about 40,000 Daltons.

[0550] With regard to the exemplary embodiments, the analog can comprise a modified amino acid in which the side chain is covalently linked to an acyl or alkyl group (e.g., an acyl or alkyl group which is non-native to a naturally-occurring amino acid). The acylated or alkylated analog can be in accordance with acylated or alkylated peptides described in the section “Acylation and alkylation.” In some embodiments, the acyl group is a C4 to a C30 fatty acyl group, such as, for example, a C10 fatty acyl or alkyl group, a C12 fatty acyl or alkyl group, a C14 fatty acyl or alkyl group, a C16 fatty acyl or alkyl group, a C18 fatty acyl or alkyl group, a C20 acyl or alkyl group, or a C22 acyl or alkyl group. The acyl or alkyl group may be covalently attached to any amino acid of the analog, including, but not limited to the amino acid at position 10 or 40, or the C-terminal amino acid. In certain embodiments, the analog comprises a C-terminal extension (e.g., an amino acid sequence of SEQ ID NO: 1095) and an addition of an amino acid comprising the acyl or alkyl group, such that the acyl or alkyl group is covalently linked to the analog at position 40. In some embodiments, the acyl or alkyl group is covalently linked to the side chain of an amino acid of Formula I, II, or III, e.g., a Lys residue. The acyl or alkyl group may be covalently linked to an amino acid which is native to the glucagon sequence (SEQ ID NO: 1001) or may be linked to an amino acid which is added to the sequence of SEQ ID NO: 1001 or to the sequence of SEQ ID NO: 1001 followed by SEQ ID NO: 1095 (at the N- or C-terminus) or may be linked to an amino acid which replaces a native amino acid, e.g., the Tyr at position 10 of SEQ ID NO: 1001.

[0551] In the above exemplary embodiments, wherein the analog comprises an acyl or alkyl group, the analog may be attached to the acyl or alkyl group via a spacer, as described herein. The spacer, for example, may be 3 to 10 atoms in length and may be, for instance, an amino acid (e.g., 6-amino hexanoic acid, any amino acid described herein), a dipeptide (e.g., Ala-Ala, βAla-βAla, Leu-Leu, Pro-Pro, γ-Glu-γ-Glu), a tripeptide, or a hydrophilic or hydrophobic bifunctional spacer. In certain aspects, the total length of the spacer and the acyl or alkyl group is about 14 to about 28 atoms. In some embodiments, the amino acid spacer is not γ-Glu. In some embodiments, the dipeptide spacer is not γ-Glu-γ-Glu.

[0552] In still further exemplary embodiments, the analog of glucagon having GIP agonist activity comprises the amino acid sequence according to any one of SEQ ID NOs: 1227, 1228, 1229 or 1230 that further comprises the following modifications:

[0553] (a) optionally, an amino acid modification at position 1 that confers GIP agonist activity,

[0554] (b) an extension of about 1 to about 21 amino acids C-terminal to the amino acid at position 29, wherein at least one of the amino acids of the extension is acylated or alkylated, and

[0555] (d) up to 6 further amino acid modifications,

[0556] wherein the EC₅₀ of the analog for GIP receptor activation is about 10 nM or less.

[0557] In some aspects, the acylated or alkylated amino acid is an amino acid of Formula I, II, or III. In more specific embodiments, the amino acid of Formula I is Dab, Orn, Lys, or homoLys. Also, in some embodiments, the about 1 to about 21 amino acids comprises the amino acid sequence of GPSSGAPPPS (SEQ ID NO: 1095) or XGPSSGAPPPS (SEQ ID NO: 1096), wherein X is any amino acid, or GPSSGAPPPK (SEQ ID NO: 1170) or XGPSSGAPPPK (SEQ ID NO: 1171) or XGPSSGAPPPSK (SEQ ID NO: 1172), wherein X is Gly or a small, aliphatic or non-polar or slightly polar amino acid. In some embodiments, the about 1 to about 21 amino acids may comprise sequences containing one or more conservative substitutions relative to SEQ ID NO: 1095, 1096, 1170, 1171 or 1172. In some embodiments, the acylated or alkylated amino acid is located at position 37, 38, 39, 40, 41, 42, or 43 of the C-terminally-extended analog. In certain embodiments, the acylated or alkylated amino acid is located at position 40 of the C-terminally extended analog.

[0558] In any of the above exemplary embodiments, the amino acid at position 1 that confers GIP agonist activity can be an amino acid lacking an imidazole side chain. The amino acid at position 1 can, for example, be a large, aromatic amino acid. In some embodiments, the large, aromatic amino acid is any of those described herein, including, for example, Tyr.

[0559] The analog of the above exemplary embodiments can further comprise 1-6 further amino acid modifications, such as, for example, any of the modifications described herein which increase or decrease the activity at any of the GIP, GLP-1, and glucagon receptors, improve solubility, improve duration of action or half-life in circulation, delay the onset of action, or increase stability.

[0560] In certain aspects, glucagon analogs described in the above exemplary embodiment, comprise further amino acid modifications at one, two or all of positions 27, 28 and 29. Modifications at these positions can be any of the modifications described herein relative to these positions. For example, relative to SEQ ID NO: 1227, 1228, 1229 or 1230, position 27 can be substituted with a large aliphatic amino acid (e.g., Leu, Ile or norleucine) or Met, position 28 can be substituted with another small aliphatic amino acid (e.g., Gly or Ala) or Asn, and/or position 29 can be substituted with another small aliphatic amino acid (e.g., Ala or Gly) or Thr. Alternatively, the analog can comprise such amino acid modifications at position 27 and/or 28.

[0561] The analog can further comprise one or more of the following additional modifications:

[0562] (i) the amino acid at position 2 is any one of D-Ser, Ala, D-Ala, Gly, N-methyl-Ser, Aib, Val, or α-amino-N-butyric acid;

[0563] (ii) the amino acid at position 10 is Tyr, Trp, Lys, Orn, Glu, Phe, or Val;

[0564] (iii) linkage of an acyl group to a Lys at position 10;

[0565] (iv) the amino acid at position 12 is Ile, Lys or Arg;

[0566] (v) the amino acid at position 16 is any one of Ser, Glu, Gln, homoglutamic acid, homocysteic acid, Thr, Gly, or Aib;

[0567] (vi) the amino acid at position 17 is Gln or Arg;

[0568] (vii) the amino acid at position 18 is any one of Ala, Arg, Ser, Thr, or Gly;

[0569] (viii) the amino acid at position 20 is any one of Ala, Ser, Thr, Lys, Citrulline, Arg, Orn, or Aib or another alpha, alpha-disubstituted amino acid;

[0570] (ix) the amino acid at position 21 is any one of Glu, Asp, homoglutamic acid, homocysteic acid;

[0571] (x) the amino acid at position 23 is Val or Ile;

[0572] (xi) the amino acid at position 24 is any one of Gln, Asn, Ala, Ser, Thr, or Aib; and

[0573] (xii) one or more conservative substitutions at any of positions 2, 5, 9, 10, 11, 12, 13, 14, 15, 16, 17, 18, 19, 20, 21, 24, 27, 28, and 29.

[0574] The analog in some embodiments comprise a combination of the modifications (i) through (xii). Alternatively or additionally, the analog can comprise an amino acid modification at position 3 (e.g., an amino acid substitution of Gln with Glu), wherein the analog has less than 1% of the activity of glucagon at the glucagon receptor. Alternatively or additionally, the analog can comprise an amino acid modification at position 7 (e.g., an amino acid substitution of Thr with an amino acid lacking a hydroxyl group, e.g., Abu or Ile), wherein the analog has less than about 10% of the activity of GLP-1 at the GLP-1 receptor.

[0575] With regard to the exemplary embodiments, the analog can be covalently linked to a hydrophilic moiety. In some embodiments, the analog is covalently linked to the hydrophilic moiety at any of amino acid positions 16, 17, 20, 21, 24, 29, 40, or the C-terminus In certain embodiments, the analog comprises a hydrophilic moiety covalently linked to the analog at position 24.

[0576] In some embodiments, the hydrophilic moiety is covalently linked to a Lys, Cys, Orn, homocysteine, or acetyl-phenylalanine of the analog. The Lys, Cys, Orn, homocysteine, or acetyl-phenylalanine may be an amino acid that is native to SEQ ID NO: 1001, 1227, 1228, 1229 or 1230 or it may be a substituted amino acid. In some embodiments, wherein the hydrophilic moiety is linked to a Cys, the linkage may comprise the structure

[chemical structure]

[0577] With regard to the analogs comprising a hydrophilic moiety, the hydrophilic moiety may be any of those described herein. See, e.g., the teachings under the section “Linkage of hydrophilic moieties.” In some embodiments, the hydrophilic moiety is a polyethylene glycol (PEG). The PEG in certain embodiments has a molecular weight of about 1,000 Daltons to about 40,000 Daltons, e.g., about 20,000 Daltons to about 40,000 Daltons.

[0578] With regard to the exemplary embodiments, the analog can comprise a modified amino acid within the C-terminal extension in which the side chain is covalently linked to an acyl or alkyl group. The acylated or alkylated analog can be in accordance with acylated or alkylated peptides described in the section “Acylation and alkylation.” In some embodiments, the acyl group is a C4 to a C30 fatty acyl group, such as, for example, a C10 fatty acyl or alkyl group, a C12 fatty acyl or alkyl group, a C14 fatty acyl or alkyl group, a C16 fatty acyl or alkyl group, a C18 fatty acyl or alkyl group, a C20 acyl or alkyl group, or a C22 acyl or alkyl group. The acyl or alkyl group may be covalently attached to any amino acid of the analog, including, but not limited to the amino acid at position 10 or 40, or the C-terminal amino acid. In some embodiments, the acyl or alkyl group is covalently linked to the side chain of an amino acid of Formula I, II, or III, e.g., a Lys residue. The acyl or alkyl group is covalently linked to an amino acid which is native to SEQ ID NO: 1001, 1227, 1228, 1229 or 1230 or it may be linked to a substituted amino acid. The acyl or alkyl group is covalently linked to an amino acid which is native to SEQ ID NO: 1095, 1096, 1171 or 1172, or it may be linked to a substituted amino acid.

[0579] In the above exemplary embodiments, wherein the analog comprises an acyl or alkyl group, the analog may be attached to the acyl or alkyl group via a spacer, as described herein. The spacer, for example, may be 3 to 10 atoms in length and may be, for instance, an amino acid (e.g., 6-amino hexanoic acid, any amino acid described herein), a dipeptide (e.g., Ala-Ala, βAla-βAla, Leu-Leu, Pro-Pro, γ-Glu-γ-Glu), a tripeptide, or a hydrophilic or hydrophobic bifunctional spacer. In certain aspects, the total length of the spacer and the acyl or alkyl group is about 14 to about 28 atoms. In some embodiments, the amino acid spacer is not γ-Glu. In some embodiments, the dipeptide spacer is not γ-Glu-γ-Glu.

[0580] In some very specific embodiments, an analog of the invention comprises an amino acid sequence selected from the group consisting of SEQ ID NOs: 1099-1141, 1144-1164, 1166, 1192-1207, 1209-1221 and 1223 or selected from the group consisting of SEQ ID NOs: 1167-1169, 1173-1178 and 1225.

[0581] Further, specific examples of analogs of the invention include but are not limited to, any of those referenced in Tables 1-3.

[0582] In still further exemplary embodiments, the analog of glucagon having GIP agonist activity comprises an acyl or alkyl group (e.g., an acyl or alkyl group which is non-native to a naturally occurring amino acid), wherein the acyl or alkyl group is attached to a spacer, wherein (i) the spacer is attached to the side chain of the amino acid at position 10 of the analog; or (ii) the analog comprises an extension of 1 to 21 amino acids C-terminal to the amino acid at position 29 and the spacer is attached to the side chain of an amino acid corresponding to one of positions 37-43 relative to SEQ ID NO: 1001, wherein the EC₅₀ of the analog for GIP receptor activation is about 10 nM or less.

[0583] In such embodiments, the analog may comprise an amino acid sequence of SEQ ID NO: 1001 with (i) an amino acid modification at position 1 that confers GIP agonist activity, (ii) amino acid modifications at one, two, or all of positions 27, 28, and 29, (iii) at least one of:

[0584] (A) the analog comprises a lactam bridge between the side chains of amino acids at positions i and i+4 or between the side chains of amino acids at positions j and j+3, wherein i is 12, 13, 16, 17, 20 or 24, and wherein j is 17;

[0585] (B) one, two, three, or all of the amino acids at positions 16, 20, 21, and 24 of the analog is substituted with an α,α-disubstituted amino acid; or

[0586] (C) the analog comprises (i) an amino acid substitution of Ser at position 16 with an amino acid of Formula IV:

[chemical structure]

wherein n is 1 to 7, wherein each of R1 and R2 is independently selected from the group consisting of H, C₁-C₁₈ alkyl, (C₁-C₁₈ alkyl)OH, (C₁-C₁₈ alkyl)NH₂, (C₁-C₁₈ alkyl)SH, (C₀-C₄ alkyl)(C₃-C₆)cycloalkyl, (C₀-C₄ alkyl)(C₂-C₅ heterocyclic), (C₀-C₄ alkyl)(C₆-C₁₀ aryl)R₇, and (C₁-C₄ alkyl)(C₃-C₉ heteroaryl), wherein R₇ is H or OH, and the side chain of the amino acid of Formula IV comprises a free amino group; and (ii) an amino acid substitution of the Gln at position 20 with an alpha, alpha-disubstituted amino acid.

[0587] and (iv) up to 6 further amino acid modifications.

[0588] The alpha, alpha-disubstituted amino acid of the analog of these embodiments may be any alpha, alpha-disubstituted amino acid, including, but not limited to, amino iso-butyric acid (Aib), an amino acid disubstituted with the same or a different group selected from methyl, ethyl, propyl, and n-butyl, or with a cyclooctane or cycloheptane (e.g., 1-aminocyclooctane-1-carboxylic acid). In certain embodiments, the alpha, alpha-disubstituted amino acid is Aib.

[0589] The amino acid of Formula IV of the analog of these embodiments may be any amino acid, such as, for example, the amino acid of Formula IV, wherein n is 1, 2, 3, 4, 5, 6, 7, 8, 9, 10, 11, 12, 13, 14, 15, or 16. In certain embodiments, n is 2, 3, 4, or 5, in which case, the amino acid is Dab, Orn, Lys, or homoLys respectively.

[0590] In any of the above exemplary embodiments, the amino acid modification at position 1 that confers GIP agonist activity can be a substitution of His with an amino acid lacking an imidazole side chain. The amino acid modification at position 1 can, for example, be a substitution of His with a large, aromatic amino acid. In some embodiments, the large, aromatic amino acid is any of those described herein, including, for example, Tyr.

[0591] Also, with regard to the above exemplary embodiments, amino acid modifications at one, two, or all of positions 27, 28, and 29 can be any of the modifications at these positions described herein. For example, the Met at position 27 can be substituted with a large aliphatic amino acid, optionally Leu, the Asn at position 28 can be substituted with a small aliphatic amino acid, optionally Ala, and/or the Thr at position 29 can be substituted with a small aliphatic amino acid, optionally Gly. Alternatively, the analog can comprise such amino acid modifications at position 27 and/or 28.

[0592] The analog of the above exemplary embodiments can further comprise 1-9 or 1-6 further, additional amino acid modifications, e.g. 1, 2, 3, 4, 5, 6, 7, 8 or 9 further amino acid modifications, such as, for example, any of the modifications described herein which increase or decrease the activity at any of the GIP, GLP-1, and glucagon receptors, improve solubility, improve duration of action or half-life in circulation, delay the onset of action, or increase stability. The analog can further comprise, for example, an amino acid modification at position 12, optionally, a substitution with Ile, and/or amino acid modifications at positions 17 and 18, optionally substitution with Q at position 17 and A at position 18, and/or an addition of GPSSGAPPPS (SEQ ID NO: 1095) or XGPSSGAPPPS (SEQ ID NO: 1096), or sequences containing one or more conservative substitutions relative to SEQ ID NO: 1095 or 1096, to the C-terminus. The analog can comprise one or more of the following modifications:

[0593] (i) Ser at position 2 substituted with D-Ser, Ala, D-Ala, Gly, N-methyl-Ser, Aib, Val, or α-amino-N-butyric acid;

[0594] (ii) Tyr at position 10 substituted with Trp, Lys, Orn, Glu, Phe, or Val;

[0595] (iii) Linkage of an acyl group to a Lys at position 10;

[0596] (iv) Lys at position 12 substituted with Arg;

[0597] (v) Ser at position 16 substituted with Glu, Gln, homoglutamic acid, homocysteic acid, Thr, Gly, Lys, or Aib;

[0598] (vi) Arg at position 17 substituted with Gln;

[0599] (vii) Arg at position 18 substituted with Ala, Ser, Thr, or Gly;

[0600] (viii) Gln at position 20 substituted with Ala, Ser, Thr, Lys, Citrulline, Arg, Orn, or Aib;

[0601] (ix) Asp at position 21 substituted with Glu, homoglutamic acid, homocysteic acid;

[0602] (x) Val at position 23 substituted with Ile;

[0603] (xi) Gln at position 24 substituted with Asn, Ala, Ser, Thr, or Aib; and

[0604] (xii) a conservative substitution at any of positions 2, 5, 9, 10, 11, 12, 13, 14, 15, 16, 17, 18, 19, 20, 21, 24, 27, 28, and 29.

[0605] The analog in some embodiments comprise a combination of the modifications (i) through (xii). Alternatively or additionally, the analog can comprise an amino acid modification at position 3 (e.g., an amino acid substitution of Gln with Glu), wherein the analog has less than 1% of the activity of glucagon at the glucagon receptor. Alternatively or additionally, the analog can comprise an amino acid modification at position 7 (e.g., an amino acid substitution of Thr with an amino acid lacking a hydroxyl group, e.g., Abu or Ile), a deletion of the amino acid(s) C-terminal to the amino acid at position 27 or 28, yielding a 27- or 28-amino acid peptide, or a combination thereof, wherein the analog has less than about 10% of the activity of GLP-1 at the GLP-1 receptor.

[0606] With regard to the exemplary embodiments, the analog can be covalently linked to a hydrophilic moiety. In some embodiments, the analog is covalently linked to the hydrophilic moiety at any of amino acid positions 16, 17, 20, 21, 24, 29, 40, or the C-terminus In certain embodiments, the analog comprises a C-terminal extension (e.g., an amino acid sequence of SEQ ID NO: 1095) and an addition of an amino acid comprising the hydrophilic moiety, such that the hydrophilic moiety is covalently linked to the analog at position 40.

[0607] In some embodiments, the hydrophilic moiety is covalently linked to a Lys, Cys, Orn, homocysteine, or acetyl-phenylalanine of the analog. The Lys, Cys, Orn, homocysteine, or acetyl-phenylalanine may be an amino acid that is native to the glucagon sequence (SEQ ID NO: 1001) or it may be an amino acid which is replacing a native amino acid of SEQ ID NO: 1001. In some embodiments, wherein the hydrophilic moiety is attached to a Cys, the linkage to the hydrophilic moiety can comprise the structure

[chemical structure]

[0608] With regard to the analogs comprising a hydrophilic moiety, the hydrophilic moiety may be any of those described herein. See, e.g., the teachings under the section “Linkage of hydrophilic moieties.” In some embodiments, the hydrophilic moiety is a polyethylene glycol (PEG). The PEG in certain embodiments has a molecular weight of about 1,000 Daltons to about 40,000 Daltons, e.g., about 20,000 Daltons to about 40,000 Daltons.

[0609] In the exemplary embodiments, wherein the analog comprises an acyl or alkyl group, which is attached to the analog via a spacer, the spacer can be any spacer as described herein. The spacer, for example, may be 3 to 10 atoms in length and may be, for instance, an amino acid (e.g., 6-amino hexanoic acid, any amino acid described herein), a dipeptide (e.g., Ala-Ala, βAla-βAla, Leu-Leu, Pro-Pro, γ-Glu-γ-Glu), a tripeptide, or a hydrophilic or hydrophobic bifunctional spacer. In certain aspects, the total length of the spacer and the acyl or alkyl group is about 14 to about 28 atoms. In some embodiments, the amino acid spacer is not γ-Glu. In some embodiments, the dipeptide spacer is not γ-Glu-γ-Glu.

[0610] The acyl or alkyl group is any acyl or alkyl group as described herein, such as an acyl or alkyl group which is non-native to a naturally occurring amino acid. The acyl or alkyl group in some embodiments is a C4 to C30 fatty acyl group, such as, for example, a C10 fatty acyl or alkyl group, a C12 fatty acyl or alkyl group, a C14 fatty acyl or alkyl group, a C16 fatty acyl or alkyl group, a C18 fatty acyl or alkyl group, a C20 acyl or alkyl group, or a C22 acyl or alkyl group, or a C4 to C30 alkyl group. In specific embodiments, the acyl group is a C12 to C18 fatty acyl group (e.g., a C14 or C16 fatty acyl group).

[0611] In some embodiments, the extension of about 1 to about 21 amino acids C-terminal to the amino acid at position 29 of the analog comprises the amino acid sequence of GPSSGAPPPS (SEQ ID NO: 1095) or XGPSSGAPPPS (SEQ ID NO: 1096), wherein X is any amino acid, or GPSSGAPPPK (SEQ ID NO: 1170) or XGPSSGAPPPK (SEQ ID NO: 1171) or XGPSSGAPPPSK (SEQ ID NO: 1172), wherein X is Gly or a small, aliphatic or non-polar or slightly polar amino acid. In some embodiments, the about 1 to about 21 amino acids may comprise sequences containing one or more conservative substitutions relative to SEQ ID NO: 1095, 1096, 1170, 1171 or 1172. In some embodiments, the acylated or alkylated amino acid is located at position 37, 38, 39, 40, 41, 42, or 43 of the C-terminally-extended analog. In certain embodiments, the acylated or alkylated amino acid is located at position 40 of the C-terminally extended analog.

[0612] The GIP agonist may be a peptide comprising the amino acid sequence of any of the amino acid sequences, e.g., SEQ ID NOs: 1005-1094, optionally with up to 1, 2, 3, 4, or 5 further modifications that retain GIP agonist activity. In certain embodiments, the GIP agonist comprises the amino acids of any of SEQ ID NOs: 1099-1275.

### Class 3 Glucagon Related Peptides

[0613] In certain embodiments, the glucagon related peptide is a Class 3 glucagon related peptide, which is described herein and in International Patent Application Publication Nos. WO 2009/155258, WO 2008/101017, and U.S. Provisional Application No. 61/288,248 (filed on Dec. 18, 2009) the contents of which are incorporated by reference in their entirety.

[0614] Some of the biological sequences referenced in the following section (SEQ ID NOs: 1-656) relating to Class 3 glucagon related peptides are correspond to SEQ ID NOs: 1-656 in International Patent Application Publication No. WO 2009/155258.

### Activity

[0615] The Class 3 glucagon related peptide can be a peptide that exhibits increased activity at the glucagon receptor, and in further embodiments exhibits enhanced biophysical stability and/or aqueous solubility. In addition, in some embodiments, the Class 3 glucagon related peptide has lost native glucagon's selectivity for the glucagon receptor verses the GLP-1 receptor, and thus represents co-agonists of those two receptors. Selected amino acid modifications within the Class 3 glucagon related peptide can control the relative activity of the peptide at the GLP-1 receptor verses the glucagon receptor. Thus, the Class 3 glucagon related peptide can be a glucagon/GLP-1 co-agonist that has higher activity at the glucagon receptor versus the GLP-1 receptor, a glucagon/GLP-1 co-agonist that has approximately equivalent activity at both receptors, or a glucagon/GLP-1 co-agonist that has higher activity at the GLP-1 receptor versus the glucagon receptor. The latter category of co-agonist can be engineered to exhibit little or no activity at the glucagon receptor, and yet retain ability to activate the GLP-1 receptor with the same or better potency than native GLP-1. Any of these co-agonists may also include modifications that confer enhanced biophysical stability and/or aqueous solubility.

[0616] Modifications of the Class 3 glucagon related peptide can be made to produce a glucagon peptide having anywhere from at least about 1% (including at least about 1.5%, 2%, 5%, 7%, 10%, 20%, 30%, 40%, 50%, 60%, 75%, 100%, 125%, 150%, 175%) to about 200% or higher activity at the GLP-1 receptor relative to native GLP-1 and anywhere from at least about 1% (including about 1.5%, 2%, 5%, 7%, 10%, 20%, 30%, 40%, 50%, 60%, 75%, 100%, 125%, 150%, 175%, 200%, 250%, 300%, 350%, 400%, 450%) to about 500% or higher activity at the glucagon receptor relative to native glucagon. The amino acid sequence of native glucagon is SEQ ID NO: 1, the amino acid sequence of GLP-1(7-36)amide is SEQ ID NO: 52, and the amino acid sequence of GLP-1(7-37) acid is SEQ ID NO: 50. In exemplary embodiments, a Class 3 glucagon related peptide may exhibit at least 10% of the activity of native glucagon at the glucagon receptor and at least 50% of the activity of native GLP-1 at the GLP-1 receptor, or at least 40% of the activity of native glucagon at the glucagon receptor and at least 40% of the activity of native GLP-1 at the GLP-1 receptor, or at least 60% of the activity of native glucagon at the glucagon receptor and at least 60% of the activity of native GLP-1 at the GLP-1 receptor.

[0617] Selectivity of a Class 3 glucagon related peptide for the glucagon receptor versus the GLP-1 receptor can be described as the relative ratio of glucagon/GLP-1 activity (the peptide's activity at the glucagon receptor relative to native glucagon, divided by the peptide's activity at the GLP-1 receptor relative to native GLP-1). For example, a Class 3 glucagon related peptide that exhibits 60% of the activity of native glucagon at the glucagon receptor and 60% of the activity of native GLP-1 at the GLP-1 receptor has a 1:1 ratio of glucagon/GLP-1 activity. Exemplary ratios of glucagon/GLP-1 activity include about 1:1, 1.5:1, 2:1, 3:1, 4:1, 5:1, 6:1, 7:1, 8:1, 9:1 or 10:1, or about 1:10, 1:9, 1:8, 1:7, 1:6, 1:5, 1:4, 1:3, 1:2, or 1:1.5. As an example, a glucagon/GLP-1 activity ratio of 10:1 indicates a 10-fold selectivity for the glucagon receptor versus the GLP-1 receptor. Similarly, a GLP-1/glucagon activity ratio of 10:1 indicates a 10-fold selectivity for the GLP-1 receptor versus the glucagon receptor.

[0618] In some embodiments, the Class 3 glucagon related peptides have about 10% or less of the activity of native glucagon at the glucagon receptor, e.g. about 1-10%, or about 0.1-10%, or greater than about 0.1% but less than about 10%, while exhibiting at least 20% of the activity of GLP-1 at the GLP-1 receptor. For example, exemplary Class 3 glucagon related peptides described herein have about 0.5%, about 1% or about 7% of the activity of native glucagon, while exhibiting at least 20% of the activity of GLP-1 at the GLP-1 receptor.

[0619] The Class 3 glucagon related peptide can be a glucagon peptide with increased or decreased activity at the glucagon receptor, or GLP-1 receptor, or both. The Class 3 glucagon related peptide can be a glucagon peptide with altered selectivity for the glucagon receptor versus the GLP-1 receptor.

[0620] Thus, as disclosed herein high potency Class 3 glucagon related peptides are provided that also exhibit improved solubility and/or stability. An exemplary high potency Class 3 glucagon related peptide exhibits at least about 200% of the activity of native glucagon at the glucagon receptor, and optionally is soluble at a concentration of at least 1 mg/mL at a pH between 6 and 8, or between 6 and 9, or between 7 and 9 (e.g. pH 7), and optionally retains at least 95% of the original peptide (e.g. 5% or less of the original peptide is degraded or cleaved) after 24 hours at 25° C. As another example, an exemplary Class 3 glucagon related peptide exhibits greater than about 40% or greater than about 60% activity at both the glucagon and the GLP-1 receptors (at a ratio between about 1:3 and 3:1, or between about 1:2 and 2:1), is optionally soluble at a concentration of at least 1 mg/mL at a pH between 6 and 8 or between 6 and 9, or between 7 and 9 (e.g. pH 7), and optionally retains at least 95% of the original peptide after 24 hours at 25° C. Another exemplary Class 3 glucagon related peptide exhibits about 175% or more of the activity of native glucagon at the glucagon receptor and about 20% or less of the activity of native GLP-1 at the GLP-1 receptor, is optionally soluble at a concentration of at least 1 mg/mL at a pH between 6 and 8 or between 6 and 9, or between 7 and 9 (e.g. pH 7), and optionally retains at least 95% of the original peptide after 24 hours at 25° C. Yet another exemplary Class 3 glucagon related peptide exhibits about 10% or less of the activity of native glucagon at the glucagon receptor and at least about 20% of the activity of native GLP-1 at the GLP-1 receptor, is optionally soluble at a concentration of at least 1 mg/mL at a pH between 6 and 8 or between 6 and 9, or between 7 and 9 (e.g. pH 7), and optionally retains at least 95% of the original peptide after 24 hours at 25° C. Yet another exemplary Class 3 glucagon related peptide exhibits about 10% or less but above 0.1%, 0.5% or 1% of the activity of native glucagon at the glucagon receptor and at least about 50%, 60%, 70%, 80%, 90% or 100% or more of the activity of native GLP-1 at the GLP-1 receptor, is optionally soluble at a concentration of at least 1 mg/mL at a pH between 6 and 8 or between 6 and 9, or between 7 and 9 (e.g. pH 7), and optionally retains at least 95% of the original peptide after 24 hours at 25° C. In some embodiments, such Class 3 glucagon related peptides retain at least 22, 23, 24, 25, 26, 27 or 28 of the naturally occurring amino acids at the corresponding positions in native glucagon (e.g. have 1-7, 1-5 or 1-3 modifications relative to naturally occurring glucagon).

### Modifications Affecting Glucagon Activity

[0621] Increased activity at the glucagon receptor is provided by an amino acid modification at position 16 of native glucagon (SEQ ID NO: 1). In some embodiments, the Class 3 glucagon related peptide is a glucagon agonist that has been modified relative to the wild type peptide of His-Ser-Gln-Gly-Thr-Phe-Thr-Ser-Asp-Tyr-Ser-Lys-Tyr-Leu-Asp-Ser-Arg-Arg-Ala-Gln-Asp-Phe-Val-Gln-Trp-Leu-Met-Asn-Thr (SEQ ID NO: 1) to enhance the peptide's potency at the glucagon receptor. The normally occurring serine at position 16 of native glucagon (SEQ ID NO: 1) can be substituted with select acidic amino acids to enhance the potency of glucagon, in terms of its ability to stimulate cAMP synthesis in a validated in vitro model assay (see Example 2). More particularly, this substitution enhances the potency of the analog at least 2-fold, 4-fold, 5-fold, and up to 10-fold greater at the glucagon receptor. This substitution also enhances the analog's activity at the GLP-1 receptor at least 5-fold, 10-fold, or 15-fold relative to native glucagon, but selectivity is maintained for the glucagon receptor over the GLP-1 receptor.

[0622] By way of nonlimiting example, such enhanced potency can be provided by substituting the naturally occurring serine at position 16 with glutamic acid or with another negatively charged amino acid having a side chain with a length of 4 atoms, or alternatively with any one of glutamine, homoglutamic acid, or homocysteic acid, or a charged amino acid having a side chain containing at least one heteroatom, (e.g. N, O, S, P) and with a side chain length of about 4 (or 3-5) atoms. In accordance with some embodiments, the serine residue at position 16 of native glucagon is substituted with an amino acid selected from the group consisting of glutamic acid, glutamine, homoglutamic acid, homocysteic acid, threonine, or glycine. In accordance with some embodiments, the serine residue at position 16 of native glucagon is substituted with an amino acid selected from the group consisting of glutamic acid, glutamine, homoglutamic acid and homocysteic acid, and in some embodiments the serine residue is substituted with glutamic acid.

[0623] In some embodiments, the enhanced potency Class 3 glucagon related peptide comprises a peptide of SEQ ID NO: 2, SEQ ID NO: 3, SEQ ID NO: 4, SEQ ID NO: 5, SEQ ID NO: 6, SEQ ID NO: 7 or a glucagon agonist analog of SEQ ID NO: 5. In accordance with some embodiments, a Class 3 glucagon related peptide having enhanced potency at the glucagon receptor relative to wild type glucagon is provided wherein the peptide comprises the sequence of SEQ ID NO: 7, SEQ ID NO: 8, SEQ ID NO: 9 or SEQ ID NO: 10, wherein the glucagon peptide retains its selectivity for the glucagon receptor relative to the GLP-1 receptors. In some embodiments, the Class 3 glucagon related peptide having enhanced specificity for the glucagon receptor comprises the peptide of SEQ ID NO: 8, SEQ ID NO: 9, SEQ ID NO: 10 or a glucagon agonist analog thereof, wherein the carboxy terminal amino acid retains its native carboxylic acid group. In accordance with some embodiments, a Class 3 glucagon related peptide comprises the sequence of NH₂-His-Ser-Gln-Gly-Thr-Phe-Thr-Ser-Asp-Tyr-Ser-Lys-Tyr-Leu-Asp-Glu-Arg-Arg-Ala-Gln-Asp-Phe-Val-Gln-Trp-Leu-Met-Asn-Thr-COOH (SEQ ID NO: 10), wherein the peptide exhibits approximately fivefold enhanced potency at the glucagon receptor, relative to native glucagon as measured by the in vitro cAMP assay of Example 2.

[0624] Glucagon receptor activity can be reduced, maintained, or enhanced by an amino acid modification at position 3, e.g. substitution of the naturally occurring glutamine at position 3. In some embodiments, substitution of the amino acid at position 3 with an acidic, basic, or hydrophobic amino acid (glutamic acid, ornithine, norleucine) has been shown to substantially reduce or destroy glucagon receptor activity. The analogs that are substituted with, for example, glutamic acid, ornithine, or norleucine have about 10% or less of the activity of native glucagon at the glucagon receptor, e.g. about 1-10%, or about 0.1-10%, or greater than about 0.1% but less than about 10%, while exhibiting at least 20% of the activity of GLP-1 at the GLP-1 receptor. For example, exemplary analogs described herein have about 0.5%, about 1% or about 7% of the activity of native glucagon, while exhibiting at least 20% of the activity of GLP-1 at the GLP-1 receptor. In particular, any of the Class 3 glucagon related peptides, including glucagon analogs, glucagon agonist analogs, glucagon co-agonists, and glucagon/GLP-1 co-agonist molecules, described herein may be modified to contain a modification at position 3, e.g., Gln substituted with Glu, to produce a peptide with high selectivity, e.g., tenfold selectivity, for the GLP-1 receptor as compared to the selectivity for the glucagon receptor.

[0625] In another embodiment, the naturally occurring glutamine at position 3 of any of the Class 3 glucagon peptides can be substituted with a glutamine analog without a substantial loss of activity at the glucagon receptor, and in some cases, with an enhancement of glucagon receptor activity, as described herein. In specific embodiments, the amino acid at position 3 is substituted with Dab(Ac). For example, glucagon agonists can comprise the amino acid sequence of SEQ ID NO: 595, SEQ ID NO: 601 SEQ ID NO: 603, SEQ ID NO: 604, SEQ ID NO: 605, and SEQ ID NO: 606.

[0626] It was observed that modifications at position 2 (e.g. Aib at position 2) and in some cases modifications at position 1 may reduce glucagon activity. This reduction in glucagon activity can be restored by stabilizing the alpha-helix in the C-terminal portion of glucagon, e.g. through means described herein, for example, through a covalent bond between the side chains of the amino acids at positions “i” and “i+4”, e.g., 12 and 16, 16 and 20, or 20 and 24. In some embodiments, this covalent bond is a lactam bridge between a glutamic acid at position 16 and a lysine at position 20. In some embodiments, this covalent bond is an intramolecular bridge other than a lactam bridge. For example, suitable covalent bonding methods include any one or more of olefin metathesis, lanthionine-based cyclization, disulfide bridge or modified sulfur-containing bridge formation, the use of α,ω-diaminoalkane tethers, the formation of metal-atom bridges, and other means of peptide cyclization.

### Modifications Affecting GLP-1 Activity

[0627] Enhanced activity at the GLP-1 receptor is provided by replacing the carboxylic acid of the C-terminal amino acid with a charge-neutral group, such as an amide or ester. In some embodiments, these Class 3 glucagon related peptides comprise a sequence of SEQ ID NO: 20, wherein the carboxy terminal amino acid has an amide group in place of the carboxylic acid group found on the native amino acid. These Class 3 glucagon related peptides have strong activity at both the glucagon and GLP-1 receptors and thus act as co-agonists at both receptors. In accordance with some embodiments, the Class 3 glucagon related peptide is a glucagon and GLP-1 receptor co-agonist, wherein the peptide comprises the sequence of SEQ ID NO: 20, wherein the amino acid at position 28 is Asn or Lys and the amino acid at position 29 is Thr-amide.

[0628] Increased activity at the GLP-1 receptor is provided by modifications that stabilize the alpha helix in the C-terminal portion of glucagon (e.g. around residues 12-29).

[0629] In some embodiments, such modifications permit formation of an intramolecular bridge between the side chains of two amino acids that are separated by three intervening amino acids (i.e., an amino acid at position “i” and an amino acid at position “i+4”, wherein i is any integer between 12 and 25), by two intervening amino acids, i.e., an amino acid at position “j” and an amino acid at position “j+3,” wherein j is any integer between 12 and 27, or by six intervening amino acids, i.e., an amino acid at position “k” and an amino acid at position “k+7,” wherein k is any integer between 12 and 22. In exemplary embodiments, the bridge or linker is about 8 (or about 7-9) atoms in length and forms between side chains of amino acids at positions 12 and 16, or at positions 16 and 20, or at positions 20 and 24, or at positions 24 and 28. The two amino acid side chains can be linked to one another through non-covalent bonds, e.g., hydrogen-bonding, ionic interactions, such as the formation of salt bridges, or by covalent bonds.

[0630] In accordance with some embodiments, the Class 3 glucagon related peptide exhibits glucagon/GLP-1 receptor co-agonist activity and comprises an amino acid sequence selected from the group consisting of SEQ ID NO: 11, 47, 48 and 49. In some embodiments, the side chains are covalently bound to one another, and in some embodiments the two amino acids are bound to one another to form a lactam ring.

[0631] In accordance with some embodiments, the Class 3 glucagon related peptide comprises SEQ ID NO: 45, wherein at least one lactam ring is formed between the side chains of an amino acid pair selected from the group consisting of amino acid pairs 12 and 16, 16 and 20, 20 and 24 or 24 and 28. In some embodiments, the Class 3 glucagon related peptide comprises a glucagon peptide analog of SEQ ID NO: 20, wherein the peptide comprises an intramolecular lactam bridge formed between amino acid positions 12 and 16 or between amino acid positions 16 and 20. In some embodiments, the Class 3 glucagon related peptide comprises the sequence of SEQ ID NO: 20, wherein an intramolecular lactam bridge is formed between amino acid positions 12 and 16, between amino acid positions 16 and 20, or between amino acid positions 20 and 24 and the amino acid at position 29 is glycine, wherein the sequence of SEQ ID NO: 29 is linked to the C-terminal amino acid of SEQ ID NO: 20. In a further embodiment, the amino acid at position 28 is aspartic acid.

[0632] In some specific embodiments, stabilization of the alpha helix structure in the C-terminal portion of the Class 3 glucagon related peptide is achieved through the formation of an intramolecular bridge other than a lactam bridge. For example, suitable covalent bonding methods include any one or more of olefin metathesis, lanthionine-based cyclization, disulfide bridge or modified sulfur-containing bridge formation, the use of α,ω-diaminoalkane tethers, the formation of metal-atom bridges, and other means of peptide cyclization are used to stabilize the alpha helix.

[0633] Furthermore, enhanced activity at the GLP-1 receptor may be achieved by stabilizing the alpha-helix structure in the C-terminal portion of the glucagon peptide (around amino acids 12-29) through purposeful introduction of one or more α,α-disubstituted amino acids at positions that retain the desired activity. Such peptides may be considered herein as a peptide lacking an intramolecular bridge. In some aspects, stabilization of the alpha-helix is accomplished in this manner without introduction of an intramolecular bridge such as a salt bridge or covalent bond. In some embodiments, one, two, three, four or more of positions 16, 17, 18, 19, 20, 21, 24 or 29 of a glucagon peptide is substituted with an α,α-disubstituted amino acid. For example, substitution of position 16 of the Class 3 glucagon related peptide with amino iso-butyric acid (Aib) enhances GLP-1 activity, in the absence of a salt bridge or lactam. In some embodiments, one, two, three or more of positions 16, 20, 21 or 24 are substituted with Aib.

[0634] Enhanced activity at the GLP-1 receptor may be achieved by an amino acid modification at position 20. In some embodiments, the glutamine at position 20 is replaced with another hydrophilic amino acid having a side chain that is either charged or has an ability to hydrogen-bond, and is at least about 5 (or about 4-6) atoms in length, for example, lysine, citrulline, arginine, or ornithine.

[0635] Increased activity at the GLP-1 receptor is demonstrated in Class 3 glucagon related peptides comprising the C-terminal extension of SEQ ID NO: 26. GLP-1 activity in such Class 3 glucagon related peptides comprising SEQ ID NO: 26 can be further increased by modifying the amino acid at position 18, 28 or 29, or at position 18 and 29, as described herein.

[0636] A further modest increase in GLP-1 potency may be achieved by modifying the amino acid at position 10 to be Trp.

[0637] Combinations of the modifications that increase GLP-1 receptor activity may provide higher GLP-1 activity than any of such modifications taken alone. For example, the Class 3 glucagon related peptides can comprise modifications at position 16, at position 20, and at the C-terminal carboxylic acid group, optionally with a covalent bond between the amino acids at positions 16 and 20; can comprise modifications at position 16 and at the C-terminal carboxylic acid group; can comprise modifications at positions 16 and 20, optionally with a covalent bond between the amino acids at positions 16 and 20; or can comprise modifications at position 20 and at the C-terminal carboxylic acid group; optionally with the proviso that the amino acid at position 12 is not Arg; or optionally with the proviso that the amino acid at position 9 is not Glu.

### Modifications Affecting Solubility

[0638] Addition of Hydrophilic Moieties

[0639] The Class 3 glucagon related peptides can be further modified to improve the peptide's solubility and stability in aqueous solutions at physiological pH, while retaining the high biological activity relative to native glucagon. Hydrophilic moieties as discussed herein can be attached to the Class 3 glucagon related peptide as further discussed herein.

[0640] In accordance with some embodiments, introduction of hydrophilic groups at positions 17, 21, and 24 of the Class 3 glucagon related peptide comprising SEQ ID NO: 9 or SEQ ID NO: 10 are anticipated to improve the solubility and stability of the high potency glucagon analog in solutions having a physiological pH. Introduction of such groups also increases duration of action, e.g. as measured by a prolonged half-life in circulation.

[0641] In some embodiments, the Class 3 glucagon related peptide comprises a sequence selected from the group consisting of SEQ ID NO: 11, SEQ ID NO: 12, SEQ ID NO: 13, SEQ ID NO: 14, SEQ ID NO: 15, SEQ ID NO: 16, SEQ ID NO: 17, SEQ ID NO: 18 and SEQ ID NO: 19, wherein the side chain of an amino acid residue at one of position 16, 17, 21 or 24 of said Class 3 glucagon related peptide further comprises a polyethylene glycol chain, having a molecular weight selected from the range of about 500 to about 40,000 Daltons. In some embodiments, the polyethylene glycol chain has a molecular weight selected from the range of about 500 to about 5,000 Daltons. In another embodiment. the polyethylene glycol chain has a molecular weight of about 10,000 to about 20,000 Daltons. In yet other exemplary embodiments the polyethylene glycol chain has a molecular weight of about 20,000 to about 40,000 Daltons.

[0642] Suitable hydrophilic moieties include any water soluble polymers known in the art, including the hydrophilic moieties described herein, homo- or co-polymers of PEG, and a monomethyl-substituted polymer of PEG (mPEG). In accordance with some embodiments the hydrophilic group comprises a polyethylene (PEG) chain. More particularly, in some embodiments, the Class 3 glucagon related peptide comprises the sequence of SEQ ID NO: 6 or SEQ ID NO: 7 wherein a PEG chain is covalently linked to the side chains of amino acids present at positions 21 and 24 of the Class 3 glucagon related peptide and the carboxy terminal amino acid of the Class 3 glucagon related peptide has the carboxylic acid group. In accordance with some embodiments, the polyethylene glycol chain has an average molecular weight selected from the range of about 500 to about 10,000 Daltons.

[0643] In accordance with some embodiments, the pegylated Class 3 glucagon related peptide comprises two or more polyethylene glycol chains covalently bound to the Class 3 glucagon related peptide wherein the total molecular weight of the glucagon chains is about 1,000 to about 5,000 Daltons. In some embodiments the pegylated glucagon agonist comprises a peptide consisting of SEQ ID NO: 5 or a glucagon agonist analog of SEQ ID NO: 5, wherein a PEG chain is covalently linked to the amino acid residue at position 21 and at position 24, and wherein the combined molecular weight of the two PEG chains is about 1,000 to about 5,000 Daltons.

### Charged C-Terminus

[0644] The solubility of the Class 3 glucagon related peptide comprising SEQ ID NO: 20 can be further improved, for example, by introducing one, two, three or more charged amino acid(s) to the C-terminal portion of glucagon peptide of SEQ ID NO: 20, preferably at a position C-terminal to position 27. Such a charged amino acid can be introduced by substituting a native amino acid with a charged amino acid, e.g. at positions 28 or 29, or alternatively by adding a charged amino acid, e.g. after position 27, 28 or 29. In exemplary embodiments, one, two, three or all of the charged amino acids are negatively charged. Additional modifications, e.g. conservative substitutions, may be made to the Class 3 glucagon related peptide that still allow it to retain glucagon activity. In some embodiments, an analog of the Class 3 glucagon related peptide of SEQ ID NO: 20 is provided wherein the analog differs from SEQ ID NO: 20 by 1 to 2 amino acid substitutions at positions 17-26, and, in some embodiments, the analog differs from the peptide of SEQ ID NO: 20 by an amino acid substitution at position 20.

### Acylation/Alkylation

[0645] In accordance with some embodiments, the glucagon peptide is modified to comprise an acyl or alkyl group, e.g., a C4 to C30 acyl or alkyl group. In some aspects, the acyl group or alkyl group is not naturally occurring on an amino acid. In specific aspects, the acyl or alkyl group is non-native to any naturally-occurring amino acid. Acylation or alkylation can increase the half-life in circulation and/or delay the onset of and/or extend the duration of action and/or improve resistance to proteases such as DPP-IV. The activity at the glucagon receptor and GLP-1 receptor of the Class 3 glucagon related peptides is maintained, if not substantially enhanced after acylation Further, the potency of the acylated analogs were comparable to the unacylated versions of the Class 3 glucagon related peptides, if not substantially enhanced.

[0646] In some embodiments, the invention provides a Class 3 glucagon related peptide modified to comprise an acyl group or alkyl group covalently linked to the amino acid at position 10 of the glucagon peptide. The glucagon peptide may further comprise a spacer between the amino acid at position 10 of the Class 3 glucagon related peptide and the acyl group or alkyl group. Any of the foregoing Class 3 glucagon related peptides may comprise two acyl groups or two alkyl groups, or a combination thereof.

[0647] In a specific aspect of the invention, the acylated Class 3 glucagon related peptide comprises the amino acid sequence of any of SEQ ID NOs: 534-544 and 546-549.

### C-Terminal Truncation

[0648] In some embodiments, the Class 3 glucagon related peptides described herein are further modified by truncation or deletion of one or two amino acids of the C-terminus of the glucagon peptide (i.e., position 29 and/or 28) without affecting activity and/or potency at the glucagon and GLP-1 receptors. In this regard, the Class 3 glucagon related peptide can comprise amino acids 1-27 or 1-28 of the native glucagon peptide (SEQ ID NO: 1), optionally with one or more modifications described herein.

[0649] In some embodiments, the truncated Class 3 glucagon related peptide comprises SEQ ID NO: 550 or SEQ ID NO: 551. In another embodiment, the truncated glucagon agonist peptide comprises SEQ ID NO: 552 or SEQ ID NO: 553.

### C-Terminal Extension

[0650] In accordance with some embodiments, the Class 3 glucagon related peptides disclosed herein are modified by the addition of a second peptide to the carboxy terminus of the glucagon peptide, for example, SEQ ID NO: 26, SEQ ID NO: 27 or SEQ ID NO: 28. In some embodiments, a Class 3 glucagon related peptide having a sequence selected from the group consisting of SEQ ID NO: 11, SEQ ID NO: 12, SEQ ID NO: 13, SEQ ID NO: 14, SEQ ID NO: 15, SEQ ID NO: 16, SEQ ID NO: 17, SEQ ID NO: 18, SEQ ID NO: 19, SEQ ID NO: 66, SEQ ID NO: 67, SEQ ID NO: 68, and SEQ ID NO: 69 is covalently bound through a peptide bond to a second peptide, wherein the second peptide comprises a sequence selected from the group consisting of SEQ ID NO: 26, SEQ ID NO: 27 and SEQ ID NO: 28. In a further embodiment, in Class 3 glucagon related peptides which comprise the C-terminal extension, the threonine at position 29 of the native glucagon peptide is replaced with a glycine. A Class 3 glucagon related peptide having a glycine substitution for threonine at position 29 and comprising the carboxy terminal extension of SEQ ID NO: 26 is four times as potent at the GLP-1 receptor as native glucagon modified to comprise the carboxy terminal extension of SEQ ID NO: 26. Potency at the GLP-1 receptor can be further enhanced by an alanine substitution for the native arginine at position 18.

[0651] Accordingly, the Class 3 glucagon related peptide can have a carboxy terminal extension of SEQ ID NO: 27 (KRNRNNIA) or SEQ ID NO: 28. In accordance with some embodiments, Class 3 glucagon related peptide comprising SEQ ID NO: 33 or SEQ ID NO: 20, further comprises the amino acid sequence of SEQ ID NO: 27 (KRNRNNIA) or SEQ ID NO: 28 linked to amino acid 29 of the glucagon peptide. More particularly, the Class 3 glucagon related peptide comprises a sequence selected from the group consisting of SEQ ID NO: 10, SEQ ID NO: 12, SEQ ID NO: 13 SEQ ID NO: 14 and SEQ ID NO: 15, further comprising the amino acid sequence of SEQ ID NO: 27 (KRNRNNIA) or SEQ ID NO: 28 linked to amino acid 29 of the glucagon peptide. More particularly, the glucagon peptide comprises a sequence selected from the group consisting of SEQ ID NO: 10, SEQ ID NO: 12, SEQ ID NO: 13 SEQ ID NO: 14, SEQ ID NO: 15, SEQ ID NO: 16, SEQ ID NO: 17, SEQ ID NO: 18, SEQ ID NO: 66, SEQ ID NO: 67, SEQ ID NO: 68, SEQ ID NO: 69, SEQ ID NO: 55 and SEQ ID NO: 56 further comprising the amino acid sequence of SEQ ID NO: 26 (GPSSGAPPPS) or SEQ ID NO: 29 linked to amino acid 29 of the Class 3 glucagon related peptide. In some embodiments, the Class 3 glucagon related peptide comprises the sequence of SEQ ID NO: 64.

### Other Modifications

[0652] Any of the modifications described above with regard to Class 3 glucagon related peptides which increase or decrease glucagon receptor activity and which increase GLP-1 receptor activity can be applied individually or in combination. Combinations of the modifications that increase GLP-1 receptor activity generally provide higher GLP-1 activity than any of such modifications taken alone. Any of the modifications described above can also be combined with other modifications described herein in reference to Class 3 glucagon related peptides that confer other desirable properties, such as increased solubility and/or stability and/or duration of action. Alternatively, any of the modifications described above can be combined with other modifications described herein in reference to Class 3 glucagon related peptides that do not substantially affect solubility or stability or activity. Exemplary modifications include but are not limited to:

[0653] (A) Improving solubility, for example, by introducing one, two, three or more charged amino acid(s) to the C-terminal portion of native glucagon, preferably at a position C-terminal to position 27. Such a charged amino acid can be introduced by substituting a native amino acid with a charged amino acid, e.g. at positions 28 or 29, or alternatively by adding a charged amino acid, e.g. after position 27, 28 or 29. In exemplary embodiments, one, two, three or all of the charged amino acids are negatively charged. In other embodiments, one, two, three or all of the charged amino acids are positively charged. Such modifications increase solubility, e.g. provide at least 2-fold, 5-fold, 10-fold, 15-fold, 25-fold, 30-fold or greater solubility relative to native glucagon at a given pH between about 5.5 and 8, e.g., pH 7, when measured after 24 hours at 25° C.

[0654] (B) Increasing solubility and duration of action or half-life in circulation by addition of a hydrophilic moiety such as a polyethylene glycol chain, as described herein, e.g. at position 16, 17, 20, 21, 24 or 29, or at the C-terminal amino acid of the peptide.

[0655] (C) Increasing stability by modification of the aspartic acid at position 15, for example, by deletion or substitution with glutamic acid, homoglutamic acid, cysteic acid or homocysteic acid. Such modifications can reduce degradation or cleavage at a pH within the range of 5.5 to 8, especially in acidic or alkaline buffers, for example, retaining at least 75%, 80%, 90%, 95%, 96%, 97%, 98% or 99% of the original peptide after 24 hours at 25° C.

[0656] (D) Increasing stability by modification of the methionine at position 27, for example, by substitution with leucine or norleucine. Such modifications can reduce oxidative degradation. Stability can also be increased by modification of the Gln at position 20 or 24, e.g. by substitution with Ser, Thr, Ala or Aib. Such modifications can reduce degradation that occurs through deamidation of Gln. Stability can be increased by modification of Asp at position 21, e.g. by substitution with Glu. Such modifications can reduce degradation that occurs through dehydration of Asp to form a cyclic succinimide intermediate followed by isomerization to iso-aspartate.

[0657] (E) Increasing resistance to dipeptidyl peptidase IV (DPP IV) cleavage by modification of the amino acid at position 1 or 2 with the DPP-IV resistant amino acids described herein and including modification of the amino acid at position 2 with N-methyl-alanine.

[0658] (F) Conservative or non-conservative substitutions, additions or deletions that do not affect activity, for example, conservative substitutions at one or more of positions 2, 5, 7, 10, 11, 12, 13, 14, 16, 17, 18, 19, 20, 21, 24, 27, 28 or 29; deletions at one or more of positions 27, 28 or 29; or a deletion of amino acid 29 optionally combined with a C-terminal amide or ester in place of the C-terminal carboxylic acid group;

[0659] (G) Adding C-terminal extensions as described herein;

[0660] (H) Increasing half-life in circulation and/or extending the duration of action and/or delaying the onset of action, for example, through acylation or alkylation of the glucagon peptide, as described herein;

[0661] (I) Homodimerization or heterodimerization as described herein.

[0662] Other modifications include substitution of His at position 1 with a large, aromatic amino acid (e.g., Tyr, Phe, Trp or amino-Phe); Ser at position 2 with Ala; substitution of Tyr at position 10 with Val or Phe; substitution of Lys at position 12 with Arg; substitution of Asp at position 15 with Glu; substitution of Ser at position 16 with Thr or Aib.

[0663] Class 3 glucagon related peptides with GLP-1 activity that contain a non-conservative substitution of His at position 1 with a large, aromatic amino acid (e.g., Tyr) can retain GLP-1 activity provided that the alpha-helix is stabilized via an intramolecular bridge, e.g., such as any of those described herein.

### Conjugates and Fusions

[0664] The Class 3 glucagon related peptide can be linked, optionally via covalent bonding and optionally via a linker, to a conjugate moiety.

[0665] The Class 3 glucagon related peptide also can be part of a fusion peptide or protein wherein a second peptide or polypeptide has been fused to a terminus, e.g., the carboxy terminus of the Class 3 glucagon related peptide.

[0666] More particularly, the fusion Class 3 glucagon related peptide may comprise a glucagon agonist of SEQ ID NO: 55, SEQ ID NO: 9 or SEQ ID NO: 10 further comprising an amino acid sequence of SEQ ID NO: 26 (GPSSGAPPPS), SEQ ID NO: 27 (KRNRNNIA) or SEQ ID NO: 28 (KRNR) linked to amino acid 29 of the glucagon peptide. In some embodiments, the amino acid sequence of SEQ ID NO: 26 (GPSSGAPPPS), SEQ ID NO: 27 (KRNRNNIA) or SEQ ID NO: 28 (KRNR) is bound to amino acid 29 of the Class 3 glucagon related peptide through a peptide bond. Applicants have discovered that in Class 3 glucagon related peptide fusion peptides comprising the C-terminal extension peptide of Exendin-4 (e.g., SEQ ID NO: 26 or SEQ ID NO: 29), substitution of the native threonine residue at position 29 with glycine dramatically increases GLP-1 receptor activity. This amino acid substitution can be used in conjunction with other modifications disclosed herein with regard to Class 3 glucagon related peptides to enhance the affinity of the glucagon analogs for the GLP-1 receptor. For example, the T29G substitution can be combined with the S16E and N20K amino acid substitutions, optionally with a lactam bridge between amino acids 16 and 20, and optionally with addition of a PEG chain as described herein. In some embodiments, a Class 3 glucagon related peptide comprises the sequence of SEQ ID NO: 64. In some embodiments, the Class 3 glucagon related peptide portion of the glucagon fusion peptide is selected from the group consisting of SEQ ID NO: 55, SEQ ID NO: 2, SEQ ID NO: 3, SEQ ID NO: 4, and SEQ ID NO: 5 wherein a PEG chain, when present at positions 17, 21, 24, or the C-terminal amino acid, or at both 21 and 24, is selected from the range of 500 to 40,000 Daltons. More particularly, in some embodiments, the Class 3 glucagon related peptide segment is selected from the group consisting of SEQ ID NO: 7, SEQ ID NO: 8, and SEQ ID NO: 63, wherein the PEG chain is selected from the range of 500 to 5,000. In some embodiments, the Class 3 glucagon related peptide is a fusion peptide comprising the sequence of SEQ ID NO: 55 and SEQ ID NO: 65 wherein the peptide of SEQ ID NO: 65 is linked to the carboxy terminus of SEQ ID NO: 55.

[0667] In accordance with some embodiments, an additional chemical modification of the Class 3 glucagon related peptide of SEQ ID NO: 10 bestows increased GLP-1 receptor potency to a point where the relative activity at the glucagon and GLP-1 receptors is virtually equivalent. Accordingly, in some embodiments, a Class 3 glucagon related peptide comprises a terminal amino acid comprising an amide group in place of the carboxylic acid group that is present on the native amino acid. The relative activity of the Class 3 glucagon related peptide at the respective glucagon and GLP-1 receptors can be adjusted by further modifications to the Class 3 glucagon related peptide to produce analogs demonstrating about 40% to about 500% or more of the activity of native glucagon at the glucagon receptor and about 20% to about 200% or more of the activity of native GLP-1 at the GLP-1 receptor, e.g. 50-fold, 100-fold or more increase relative to the normal activity of glucagon at the GLP-1 receptor. In some embodiments, the glucagon peptides described herein exhibit up to about 100%, 1000%, 10,000%, 100,000%, or 1,000,000% of the activity of native glucagon at the glucagon receptor. In some embodiments, the glucagon peptides described herein exhibit up to about 100%, 1000%, 10,000%, 100,000%, or 1,000,000% of the activity of native GLP-1 at the GLP-1 receptor.

### Exemplary Embodiments

[0668] In accordance with some embodiments, a glucagon analog is provided comprising the sequence of SEQ ID NO: 55, wherein said analog differs from SEQ ID NO: 55 by 1 to 3 amino acids, selected from positions 1, 2, 3, 5, 7, 10, 11, 13, 14, 17, 18, 19, 21, 24, 27, 28, and 29, wherein said glucagon peptide exhibits at least 20% of the activity of native GLP-1 at the GLP-1 receptor.

[0669] In accordance with some embodiments a glucagon/GLP-1 receptor co-agonist is provided comprising the sequence:

[0670] NH₂-His-Ser-Gln-Gly-Thr-Phe-Thr-Ser-Asp-Tyr-Ser-Lys-Tyr-Leu-Xaa-Xaa-Arg-Arg-Ala-Xaa-Asp-Phe-Val-Xaa-Trp-Leu-Met-Xaa-Xaa-R (SEQ ID NO: 33) wherein the Xaa at position 15 is selected from the group of amino acids consisting of Asp, Glu, cysteic acid, homoglutamic acid and homocysteic acid, Xaa at position 16 is selected from the group of amino acids consisting of Ser, Glu, Gln, homoglutamic acid and homocysteic acid, the Xaa at position 20 is Gln or Lys, the Xaa at position 24 is Gln or Glu, the Xaa at position 28 is Asn, Lys or an acidic amino acid, the Xaa at position 29 is Thr, Gly or an acidic amino acid, and R is COOH or CONH₂, with the proviso that when position 16 is serine, position 20 is Lys, or alternatively when position 16 is serine the position 24 is Glu and either position 20 or position 28 is Lys. In some embodiments the glucagon/GLP-1 receptor co-agonist comprises the sequence of SEQ ID NO: 33 wherein the amino acid at position 28 is aspartic acid and the amino acid at position 29 is glutamic acid. In another embodiment the amino acid at position 28 is the native asparagine, the amino acid at position 29 is glycine and the amino acid sequence of SEQ ID NO: 29 or SEQ ID NO: 65 is covalently linked to the carboxy terminus of SEQ ID NO: 33.

[0671] In some embodiments a co-agonist is provided comprising the sequence of SEQ ID NO: 33 wherein an additional acidic amino acid added to the carboxy terminus of the peptide. In a further embodiment the carboxy terminal amino acid of the glucagon analog has an amide in place of the carboxylic acid group of the natural amino acid. In some embodiments the glucagon analog comprises a sequence selected from the group consisting of SEQ ID NO: 40, SEQ ID NO: 41, SEQ ID NO: 42, SEQ ID NO: 43 and SEQ ID NO: 44.

[0672] In accordance with some embodiments a glucagon peptide analog of SEQ ID NO: 33 is provided, wherein said analog differs from SEQ ID NO: 33 by 1 to 3 amino acids, selected from positions 1, 2, 3, 5, 7, 10, 11, 13, 14, 17, 18, 19, 21 and 27, with the proviso that when the amino acid at position 16 is serine, either position 20 is lysine, or a lactam bridge is formed between the amino acid at position 24 and either the amino acid at position 20 or position 28. In accordance with some embodiments the analog differs from SEQ ID NO: 33 by 1 to 3 amino acids selected from positions 1, 2, 3, 21 and 27. In some embodiments the glucagon peptide analog of SEQ ID NO: 33 differs from that sequence by 1 to 2 amino acids, or in some embodiments by a single amino acid, selected form positions 1, 2, 3, 5, 7, 10, 11, 13, 14, 17, 18, 19, 21 and 27, with the proviso that when the amino acid at position 16 is serine, either position 20 is lysine, or a lactam bridge is formed between the amino acid at position 24 and either the amino acid at position 20 or position 28.

[0673] In accordance with another embodiment a relatively selective GLP-1 receptor agonist is provided comprising the sequence NH₂-His-Ser-Xaa-Gly-Thr-Phe-Thr-Ser-Asp-Tyr-Ser-Lys-Tyr-Leu-Xaa-Xaa-Arg-Arg-Ala-Xaa-Asp-Phe-Val-Xaa-Trp-Leu-Met-Xaa-Xaa-R (SEQ ID NO: 53) wherein the Xaa at position 3 is selected from the group of amino acids consisting of Glu, Orn or Nle, the Xaa at position 15 is selected from the group of amino acids consisting of Asp, Glu, cysteic acid, homoglutamic acid and homocysteic acid, Xaa at position 16 is selected from the group of amino acids consisting of Ser, Glu, Gln, homoglutamic acid and homocysteic acid, the Xaa at position 20 is Gln or Lys, the Xaa at position 24 is Gln or Glu, the Xaa at position 28 is Asn, Lys or an acidic amino acid, the Xaa at position 29 is Thr, Gly or an acidic amino acid, and R is COOH, CONH2, SEQ ID NO: 26 or SEQ ID NO: 29, with the proviso that when position 16 is serine, position 20 is Lys, or alternatively when position 16 is serine the position 24 is Glu and either position 20 or position 28 is Lys. In some embodiments the amino acid at position 3 is glutamic acid. In some embodiments the acidic amino acid substituted at position 28 and/or 29 is aspartic acid or glutamic acid. In some embodiments the glucagon peptide, including a co-agonist peptide, comprises the sequence of SEQ ID NO: 33 further comprising an additional acidic amino acid added to the carboxy terminus of the peptide. In a further embodiment the carboxy terminal amino acid of the glucagon analog has an amide in place of the carboxylic acid group of the natural amino acid.

[0674] In accordance with some embodiments a glucagon/GLP-1 receptor co-agonist is provided comprising a modified glucagon peptide selected from the group consisting of:

[0675] NH₂-His-Ser-Gln-Gly-Thr-Phe-Thr-Ser-Asp-Tyr-Ser-Lys-Tyr-Leu-Xaa-Xaa-Arg-Arg-Ala-Xaa-Asp-Phe-Val-Xaa-Trp-Leu-Met-Xaa-Xaa-R (SEQ ID NO: 34), wherein the Xaa at position 15 is selected from the group of amino acids consisting of Asp, Glu, cysteic acid, homoglutamic acid and homocysteic acid, Xaa at position 16 is selected from the group of amino acids consisting of Ser, Glu, Gln, homoglutamic acid and homocysteic acid, the Xaa at position 20 is Gln or Lys, the Xaa at position 24 is Gln or Glu and the Xaa at position 28 is Asn, Asp or Lys, R is COOH or CONH₂, the Xaa at position 29 is Thr or Gly, and R is COOH, CONH₂, SEQ ID NO: 26 or SEQ ID NO: 29, with the proviso that when position 16 is serine, position 20 is Lys, or alternatively when position 16 is serine the position 24 is Glu and either position 20 or position 28 is Lys. In some embodiments R is CONH₂, the Xaa at position 15 is Asp, the Xaa at position 16 is selected from the group of amino acids consisting of Glu, Gln, homoglutamic acid and homocysteic acid, the Xaas at positions 20 and 24 are each Gln the Xaa at position 28 is Asn or Asp and the Xaa at position 29 is Thr. In some embodiments the Xaas at positions 15 and 16 are each Glu, the Xaas at positions 20 and 24 are each Gln, the Xaa at position 28 is Asn or Asp, the Xaa at position 29 is Thr and R is CONH₂.

[0676] It has been reported that certain positions of the native glucagon peptide can be modified while retaining at least some of the activity of the parent peptide. Accordingly, applicants anticipate that one or more of the amino acids located at positions at positions 2, 5, 7, 10, 11, 12, 13, 14, 17, 18, 19, 20, 21, 24, 27, 28 or 29 of the peptide of SEQ ID NO: 11 can be substituted with an amino acid different from that present in the native glucagon peptide, and still retain activity at the glucagon receptor. In some embodiments the methionine residue present at position 27 of the native peptide is changed to leucine or norleucine to prevent oxidative degradation of the peptide. In another embodiment the amino acid at position 20 is substituted with Lys, Arg, Orn or Citrullene and/or position 21 is substituted with Glu, homoglutamic acid or homocysteic acid.

[0677] In some embodiments a glucagon analog of SEQ ID NO: 20 is provided wherein 1 to 6 amino acids, selected from positions 1, 2, 5, 7, 10, 11, 13, 14, 17, 18, 19, 21, 27, 28 or 29 of the analog differ from the corresponding amino acid of SEQ ID NO: 1, with the proviso that when the amino acid at position 16 is serine, position 20 is Lys, or alternatively when position 16 is serine the position 24 is Glu and either position 20 or position 28 is Lys. In accordance with another embodiment a glucagon analog of SEQ ID NO: 20 is provided wherein 1 to 3 amino acids selected from positions 1, 2, 5, 7, 10, 11, 13, 14, 17, 18, 19, 20, 21, 27, 28 or 29 of the analog differ from the corresponding amino acid of SEQ ID NO: 1. In another embodiment, a glucagon analog of SEQ ID NO: 8, SEQ ID NO: 9 or SEQ ID NO: 11 is provided wherein 1 to 2 amino acids selected from positions 1, 2, 5, 7, 10, 11, 13, 14, 17, 18, 19, 20 or 21 of the analog differ from the corresponding amino acid of SEQ ID NO: 1, and in a further embodiment the one to two differing amino acids represent conservative amino acid substitutions relative to the amino acid present in the native glucagon sequence (SEQ ID NO: 1). In some embodiments a glucagon peptide of SEQ ID NO: 12, SEQ ID NO: 13, SEQ ID NO: 14 or SEQ ID NO: 15 is provided wherein the glucagon peptide further comprises one, two or three amino acid substitutions at positions selected from positions 2, 5, 7, 10, 11, 13, 14, 17, 18, 19, 20, 21, 27 or 29. In some embodiments the substitutions at positions 2, 5, 7, 10, 11, 13, 14, 16, 17, 18, 19, 20, 21, 27 or 29 are conservative amino acid substitutions.

[0678] In accordance with some embodiments a glucagon/GLP-1 receptor co-agonist is provided comprising a variant of the sequence of SEQ ID NO 33, wherein 1 to 10 amino acids selected from positions 16, 17, 18, 20, 21, 23, 24, 27, 28 and 29, respectively, of the variant differ from the corresponding amino acid of SEQ ID NO: 1. In accordance with some embodiments a variant of the sequence of SEQ ID NO 33 is provided wherein the variant differs from SEQ ID NO: 33 by one or more amino acid substitutions selected from the group consisting of Gln17, Ala18, Glu21, Ile23, Ala24, Val27 and Gly29. In accordance with some embodiments a glucagon/GLP-1 receptor co-agonist is provided comprising variants of the sequence of SEQ ID NO 33, wherein 1 to 2 amino acids selected from positions 17-26 of the variant differ from the corresponding amino acid of SEQ ID NO: 1. In accordance with some embodiments a variant of the sequence of SEQ ID NO 33 is provided wherein the variant differs from SEQ ID NO: 33 by an amino acid substitution selected from the group consisting of Gln17, Ala18, Glu21, Ile23 and Ala24. In accordance with some embodiments a variant of the sequence of SEQ ID NO 33 is provided wherein the variant differs from SEQ ID NO: 33 by an amino acid substitution at position 18 wherein the substituted amino acid is selected from the group consisting of Ala, Ser, Thr, and Gly. In accordance with some embodiments a variant of the sequence of SEQ ID NO 33 is provided wherein the variant differs from SEQ ID NO: 33 by an amino acid substitution of Ala at position 18. Such variations are encompassed by SEQ ID NO: 55. In another embodiment a glucagon/GLP-1 receptor co-agonist is provided comprising variants of the sequence of SEQ ID NO 33, wherein 1 to 2 amino acids selected from positions 17-22 of the variant differ from the corresponding amino acid of SEQ ID NO: 1, and in a further embodiment a variant of SEQ ID NO 33 is provided wherein the variant differs from SEQ ID NO: 33 by for 2 amino acid substitutions at positions 20 and 21. In accordance with some embodiments a glucagon/GLP-1 receptor co-agonist is provided comprising the sequence:

[0679] NH₂-His-Ser-Gln-Gly-Thr-Phe-Thr-Ser-Asp-Tyr-Ser-Lys-Tyr-Leu-Xaa-Xaa-Arg-Arg-Ala-Xaa-Xaa-Phe-Val-Xaa-Trp-Leu-Met-Xaa-Xaa-R (SEQ ID NO: 51), wherein the Xaa at position 15 is Asp, Glu, cysteic acid, homoglutamic acid or homocysteic acid, the Xaa at position 16 is Ser, Glu, Gln, homoglutamic acid or homocysteic acid, the Xaa at position 20 is Gln, Lys, Arg, Orn or citrulline, the Xaa at position 21 is Asp, Glu, homoglutamic acid or homocysteic acid, the Xaa at position 24 is Gln or Glu, the Xaa at position 28 is Asn, Lys or an acidic amino acid, the Xaa at position 29 is Thr or an acid amino acid and R is COOH or CONH₂. In some embodiments R is CONH2. In accordance with some embodiments a glucagon/GLP-1 receptor co-agonist is provided comprising a variant of SEQ ID NO: 11, SEQ ID NO: 12, SEQ ID NO: 13, SEQ ID NO: 14, SEQ ID NO: 15, SEQ ID NO: 47, SEQ ID NO: 48 or SEQ ID NO: 49, wherein the variant differs from said sequence by an amino acid substitution at position 20. In some embodiments the amino acid substitution is selected form the group consisting of Lys, Arg, Orn or citrulline for position 20.

[0680] In some embodiments a glucagon agonist is provided comprising an analog peptide of SEQ ID NO: 34 wherein the analog differs from SEQ ID NO: 34 by having an amino acid other than serine at position 2. In some embodiments the serine residue is substituted with aminoisobutyric acid, D-alanine, and in some embodiments the serine residue is substituted with aminoisobutyric acid. Such modifications suppresses cleavage by dipeptidyl peptidase IV while retaining the inherent potency of the parent compound (e.g. at least 75, 80, 85, 90, 95% or more of the potentcy of the parent compound). In some embodiments the solubility of the analog is increased, for example, by introducing one, two, three or more charged amino acid(s) to the C-terminal portion of native glucagon, preferably at a position C-terminal to position 27. In exemplary embodiments, one, two, three or all of the charged amino acids are negatively charged. In another embodiment the analog further comprises an acidic amino acid substituted for the native amino acid at position 28 or 29 or an acidic amino acid added to the carboxy terminus of the peptide of SEQ ID NO: 34.

[0681] In some embodiments the glucagon analogs disclosed herein are further modified at position 1 or 2 to reduce susceptibility to cleavage by dipeptidyl peptidase IV. In some embodiments a glucagon analog of SEQ ID NO: 9, SEQ ID NO: 11, SEQ ID NO: 12, SEQ ID NO: 13, SEQ ID NO: 14 or SEQ ID NO: 15 is provided wherein the analog differs from the parent molecule by a substitution at position 2 and exhibits reduced susceptibility (i.e., resistance) to cleavage by dipeptidyl peptidase IV. More particularly, in some embodiments position 2 of the analog peptide is substituted with an amino acid selected from the group consisting of D-serine, D-alanine, valine, amino n-butyric acid, glycine, N-methyl serine and aminoisobutyric acid. In some embodiments position 2 of the analog peptide is substituted with an amino acid selected from the group consisting of D-serine, D-alanine, glycine, N-methyl serine and aminoisobutyric acid. In another embodiment position 2 of the analog peptide is substituted with an amino acid selected from the group consisting of D-serine, glycine, N-methyl serine and aminoisobutyric acid. In some embodiments the amino acid at position 2 is not D-serine. In some embodiments the glucagon peptide comprises the sequence of SEQ ID NO: 21 or SEQ ID NO: 22.

[0682] In some embodiments a glucagon analog of SEQ ID NO: 9, SEQ ID NO: 11, SEQ ID NO: 12, SEQ ID NO: 13, SEQ ID NO: 14 or SEQ ID NO: 15 is provided wherein the analog differs from the parent molecule by a substitution at position 1 and exhibits reduced susceptibility (i.e., resistance) to cleavage by dipeptidyl peptidase IV. More particularly, position 1 of the analog peptide is substituted with an amino acid selected from the group consisting of D-histidine, alpha, alpha-dimethyl imidiazole acetic acid (DMIA), N-methyl histidine, alpha-methyl histidine, imidazole acetic acid, desaminohistidine, hydroxyl-histidine, acetyl-histidine and homo-histidine. In another embodiment a glucagon agonist is provided comprising an analog peptide of SEQ ID NO: 34 wherein the analog differs from SEQ ID NO: 34 by having an amino acid other than histidine at position 1. In some embodiments the solubility of the analog is increased, for example, by introducing one, two, three or more charged amino acid(s) to the C-terminal portion of native glucagon, preferably at a position C-terminal to position 27. In exemplary embodiments, one, two, three or all of the charged amino acids are negatively charged. In another embodiment the analog further comprises an acidic amino acid substituted for the native amino acid at position 28 or 29 or an acidic amino acid added to the carboxy terminus of the peptide of SEQ ID NO: 34. In some embodiments the acidic amino acid is aspartic acid or glutamic acid.

[0683] In some embodiments the glucagon/GLP-1 receptor co-agonist comprises a sequence of SEQ ID NO: 20 further comprising an additional carboxy terminal extension of one amino acid or a peptide selected from the group consisting of SEQ ID NO: 26, SEQ ID NO: 27 and SEQ ID NO: 28. In the embodiment wherein a single amino acid is added to the carboxy terminus of SEQ ID NO: 20, the amino acid is typically selected from one of the 20 common amino acids, and in some embodiments the additional carboxy terminus amino acid has an amide group in place of the carboxylic acid of the native amino acid. In some embodiments the additional amino acid is selected from the group consisting of glutamic acid, aspartic acid and glycine.

[0684] In an alternative embodiment a glucagon/GLP-1 receptor co-agonist is provided wherein the peptide comprises at least one lactam ring formed between the side chain of a glutamic acid residue and a lysine residue, wherein the glutamic acid residue and a lysine residue are separated by three amino acids. In some embodiments the carboxy terminal amino acid of the lactam bearing glucagon peptide has an amide group in place of the carboxylic acid of the native amino acid. More particularly, in some embodiments a glucagon and GLP-1 co-agonist is provided comprising a modified glucagon peptide selected from the group consisting of:

(SEQ ID NO: 66)
NH₂-His-Ser-Gln-Gly-Thr-Phe-Thr-Ser-Asp-Tyr-Ser-Lys-Tyr-Leu-Asp-Glu-Arg-Arg-
Ala-Gln-Asp-Phe-Val-Gln-Trp-Leu-Met-Xaa-Xaa-R
(SEQ ID NO: 67)
NH₂-His-Ser-Gln-Gly-Thr-Phe-Thr-Ser-Asp-Tyr-Ser-Lys-Tyr-Leu-Asp-Glu-Arg-Arg-
Ala-Lys-Asp-Phe-Val-Gln-Trp-Leu-Met-Xaa-Xaa-R
(SEQ ID NO: 68)
NH₂-His-Ser-Gln-Gly-Thr-Phe-Thr-Ser-Asp-Tyr-Ser-Lys-Tyr-Leu-Asp-Ser-Arg-Arg-
Ala-Lys-Asp-Phe-Val-Glu-Trp-Leu-Met-Xaa-Xaa-R
(SEQ ID NO: 69)
NH₂-His-Ser-Gln-Gly-Thr-Phe-Thr-Ser-Asp-Tyr-Ser-Lys-Tyr-Leu-Asp-Ser-Arg-Arg-
Ala-Gln-Asp-Phe-Val-Glu-Trp-Leu-Met-Lys-Xaa-R
(SEQ ID NO: 16)
NH₂-His-Ser-Gln-Gly-Thr-Phe-Thr-Ser-Asp-Tyr-Ser-Lys-Tyr-Leu-Asp-Glu-Arg-Arg-
Ala-Lys-Asp-Phe-Val-Glu-Trp-Leu-Met-Asn-Thr-R
(SEQ ID NO: 17)
NH₂-His-Ser-Gln-Gly-Thr-Phe-Thr-Ser-Asp-Tyr-Ser-Lys-Tyr-Leu-Asp-Glu-Arg-Arg-
Ala-Gln-Asp-Phe-Val-Glu-Trp-Leu-Met-Lys-Thr-R
(SEQ ID NO: 18)
NH₂-His-Ser-Gln-Gly-Thr-Phe-Thr-Ser-Asp-Tyr-Ser-Lys-Tyr-Leu-Asp-Glu-Arg-Arg-
Ala-Lys-Asp-Phe-Val-Glu-Trp-Leu-Met-Lys-Thr-R

[0685] wherein Xaa at position 28 is Asp, or Asn, the Xaa at position 29 is Thr or Gly, R is selected from the group consisting of COOH, CONH₂, glutamic acid, aspartic acid, glycine, SEQ ID NO: 26, SEQ ID NO: 27 and SEQ ID NO: 28, and a lactam bridge is formed between Lys at position 12 and Glu at position 16 for SEQ ID NO: 66, between Glu at position 16 and Lys at position 20 for SEQ ID NO: 67, between Lys at position 20 and Glu at position 24 for SEQ ID NO: 68, between Glu at position 24 and Lys at position 28 for SEQ ID NO: 69, between Lys at position 12 and Glu at position 16 and between Lys at position 20 and Glu at position 24 for SEQ ID NO: 16, between Lys at position 12 and Glu at position 16 and between Glu at position 24 and Lys at position 28 for SEQ ID NO: 17 and between Glu at position 16 and Lys at position 20 and between Glu at position 24 and Lys at position 28 for SEQ ID NO: 18. In some embodiments R is selected from the group consisting of COOH, CONH₂, glutamic acid, aspartic acid, glycine, the amino acid at position 28 is Asn, and the amino acid at position 29 is threonine. In some embodiments R is CONH₂, the amino acid at position 28 is Asn and the amino acid at position 29 is threonine. In another embodiment R is selected from the group consisting of SEQ ID NO: 26, SEQ ID NO: 29 and SEQ ID NO: 65 and the amino acid at position 29 is glycine.

[0686] In a further embodiment the glucagon/GLP-1 receptor co-agonist is selected from the group consisting of SEQ ID NO: 11, SEQ ID NO: 12, SEQ ID NO: 13, SEQ ID NO: 14, SEQ ID NO: 15, SEQ ID NO: 16, SEQ ID NO: 17 and SEQ ID NO: 18, wherein the peptide further comprises an additional carboxy terminal extension of one amino acid or a peptide selected from the group consisting of SEQ ID NO: 26, SEQ ID NO: 27 and SEQ ID NO: 28. In some embodiments the terminal extension comprises the sequence of SEQ ID NO: 26, SEQ ID NO: 29 or SEQ ID NO: 65 and the glucagon peptide comprises the sequence of SEQ ID NO: 55. In some embodiments the glucagon/GLP-1 receptor co-agonist comprises the sequence of SEQ ID NO: 33 wherein the amino acid at position 16 is glutamic acid, the amino acid at position 20 is lysine, the amino acid at position 28 is asparagine and the amino acid sequence of SEQ ID No: 26 or SEQ ID NO: 29 is linked to the carboxy terminus of SEQ ID NO: 33.

[0687] In the embodiment wherein a single amino acid is added to the carboxy terminus of SEQ ID NO: 20, the amino acid is typically selected from one of the 20 common amino acids, and in some embodiments the amino acid has an amide group in place of the carboxylic acid of the native amino acid. In some embodiments the additional amino acid is selected from the group consisting of glutamic acid and aspartic acid and glycine. In the embodiments wherein the glucagon agonist analog further comprises a carboxy terminal extension, the carboxy terminal amino acid of the extension, in some embodiments, ends in an amide group or an ester group rather than a carboxylic acid.

[0688] In another embodiment the glucagon/GLP-1 receptor co-agonist comprises the sequence: NH₂-His-Ser-Gln-Gly-Thr-Phe-Thr-Ser-Asp-Tyr-Ser-Lys-Tyr-Leu-Asp-Glu-Arg-Arg-Ala-Gln-Asp-Phe-Val-Gln-Trp-Leu-Met-Asn-Thr-Xaa-CONH₂ (SEQ ID NO: 19), wherein the Xaa at position 30 represents any amino acid. In some embodiments Xaa is selected from one of the 20 common amino acids, and in some embodiments the amino acid is glutamic acid, aspartic acid or glycine. The solubility of this peptide can be further improved by covalently linking a PEG chain to the side chain of amino acid at position 17, 21, 24 or 30 of SEQ ID NO: 19. In a further embodiment the peptide comprises an additional carboxy terminal extension of a peptide selected from the group consisting of SEQ ID NO: 26, SEQ ID NO: 27 and SEQ ID NO: 28. In accordance with some embodiments the glucagon/GLP-1 receptor co-agonist comprises the sequence of SEQ ID NO: 30, SEQ ID NO: 31 and SEQ ID NO: 32.

[0689] Additional site specific modifications internal to the glucagon sequence of SEQ ID NO: 11, SEQ ID NO: 12, SEQ ID NO: 13, SEQ ID NO: 14, SEQ ID NO: 15, SEQ ID NO: 16, SEQ ID NO: 17, SEQ ID NO: 18, SEQ ID NO: 19 and SEQ ID NO: 64 can be made to yield a set of glucagon agonists that possess variable degrees of GLP-1 agonism. Accordingly, peptides that possess virtually identical in vitro potency at each receptor have been prepared and characterized. Similarly, peptides with tenfold selectively enhanced potency at each of the two receptors have been identified and characterized. As noted above substitution of the serine residue at position 16 with glutamic acid enhances the potency of native glucagon at both the Glucagon and GLP-1 receptors, but maintains approximately a tenfold selectivity for the glucagon receptor. In addition by substituting the native glutamine at position 3 with glutamic acid (SEQ ID NO: 22) generates a glucagon analog that exhibits approximately a tenfold selectivity for the GLP-1 receptor.

[0690] The solubility of the glucagon/GLP-1 co-agonist peptides can be further enhanced in aqueous solutions at physiological pH, while retaining the high biological activity relative to native glucagon by the introduction of hydrophilic groups at positions 16, 17, 21, and 24 of the peptide, or by the addition of a single modified amino acid (i.e., an amino acid modified to comprise a hydrophilic group) at the carboxy terminus of the glucagon/GLP-1 co-agonist peptide. In accordance with some embodiments the hydrophilic group comprises a polyethylene (PEG) chain. More particularly, in some embodiments the glucagon peptide comprises the sequence of SEQ ID NO: 10, SEQ ID NO: 11, SEQ ID NO: 12, SEQ ID NO: 13, SEQ ID NO: 14, SEQ ID NO: 15, SEQ ID NO: 16, SEQ ID NO: 17 or SEQ ID NO: 18 wherein a PEG chain is covalently linked to the side chain of an amino acids at position 16, 17, 21, 24, 29 or the C-terminal amino acid of the glucagon peptide, with the proviso that when the peptide comprises SEQ ID NO: 10, SEQ ID NO: 11, SEQ ID NO: 12 or SEQ ID NO: 13 the polyethylene glycol chain is covalently bound to an amino acid residue at position 17, 21 or 24, when the peptide comprises SEQ ID NO: 14 or SEQ ID NO: 15 the polyethylene glycol chain is covalently bound to an amino acid residue at position 16, 17 or 21, and when the peptide comprises SEQ ID NO: 16, SEQ ID NO: 17 or SEQ ID NO: 18 the polyethylene glycol chain is covalently bound to an amino acid residue at position 17 or 21.

[0691] In some embodiments the glucagon peptide comprises the sequence of SEQ ID NO: 11, SEQ ID NO: 12 or SEQ ID NO: 13, wherein a PEG chain is covalently linked to the side chain of an amino acids at position 17, 21, 24, or the C-terminal amino acid of the glucagon peptide, and the carboxy terminal amino acid of the peptide has an amide group in place of the carboxylic acid group of the native amino acid. In some embodiments the glucagon/GLP-1 receptor co-agonist peptide comprises a sequence selected from the group consisting of SEQ ID NO: 12, SEQ ID NO: 13, SEQ ID NO: 14, SEQ ID NO: 15, SEQ ID NO: 16, SEQ ID NO: 17, SEQ ID NO: 18 and SEQ ID NO: 19, wherein a PEG chain is covalently linked to the side chain of an amino acid at position 17, 21 or 24 of SEQ ID NO: 12, SEQ ID NO: 13 and SEQ ID NO: 19, or at position 16, 17 or 21 of SEQ ID NO: 14 and SEQ ID NO: 15 or at position 17 or 21 of SEQ ID NO: 16, SEQ ID NO: 17 and SEQ ID NO: 18 of the glucagon peptide. In another embodiment the glucagon/GLP-1 receptor co-agonist peptide comprises the sequence of SEQ ID NO: 11 or SEQ ID NO: 19, wherein a PEG chain is covalently linked to the side chain of an amino acids at position 17, 21 or 24 or the C-terminal amino acid of the glucagon peptide.

[0692] In accordance with some embodiments, and subject to the proviso limitations described in the preceding paragraphs, the glucagon co-agonist peptide is modified to contain one or more amino acid substitution at positions 16, 17, 21, 24, or 29 or the C-terminal amino acid, wherein the native amino acid is substituted with an amino acid having a side chain suitable for crosslinking with hydrophilic moieties, including for example, PEG. The native peptide can be substituted with a naturally occurring amino acid or a synthetic (non-naturally occurring) amino acid. Synthetic or non-naturally occurring amino acids refer to amino acids that do not naturally occur in vivo but which, nevertheless, can be incorporated into the peptide structures described herein. Alternatively, the amino acid having a side chain suitable for crosslinking with hydrophilic moieties, including for example, PEG, can be added to the carboxy terminus of any of the glucagon analogs disclosed herein. In accordance with some embodiments an amino acid substitution is made in the glucagon/GLP-1 receptor co-agonist peptide at a position selected from the group consisting of 16, 17, 21, 24, or 29 replacing the native amino acid with an amino acid selected from the group consisting of lysine, cysteine, ornithine, homocysteine and acetyl phenylalanine, wherein the substituting amino acid further comprises a PEG chain covalently bound to the side chain of the amino acid. In some embodiments a glucagon peptide selected form the group consisting of SEQ ID NO: 12, SEQ ID NO: 13, SEQ ID NO: 14, SEQ ID NO: 15, SEQ ID NO: 16, SEQ ID NO: 17, SEQ ID NO: 18, and SEQ ID NO: 19 is further modified to comprise a PEG chain is covalently linked to the side chain of an amino acid at position 17 or 21 of the glucagon peptide. In some embodiments the pegylated glucagon/GLP-1 receptor co-agonist further comprises the sequence of SEQ ID NO: 26, SEQ ID NO: 27 or SEQ ID NO: 29.

[0693] In another embodiment the glucagon peptide comprises the sequence of SEQ ID NO: 55 or SEQ ID NO: 56, further comprising a C-terminal extension of SEQ ID NO: 26, SEQ ID NO: 29 or SEQ ID NO: 65 linked to the C-terminal amino acid of SEQ ID NO: 55 or SEQ ID NO: 56, and optionally further comprising a PEG chain covalently linked to the side chain of an amino acids at position 17, 18, 21, 24 or 29 or the C-terminal amino acid of the peptide. In another embodiment the glucagon peptide comprises the sequence of SEQ ID NO: 55 or SEQ ID NO: 56, wherein a PEG chain is covalently linked to the side chain of an amino acids at position 21 or 24 of the glucagon peptide and the peptide further comprises a C-terminal extension of SEQ ID NO: 26, or SEQ ID NO: 29.

[0694] In another embodiment the glucagon peptide comprises the sequence of SEQ ID NO: 55, or SEQ ID NO: 33 or SEQ ID NO: 34, wherein an additional amino acid is added to the carboxy terminus of SEQ ID NO: 33 or SEQ ID NO: 34, and a PEG chain is covalently linked to the side chain of the added amino acid. In a further embodiment, the pegylated glucagon analog further comprises a C-terminal extension of SEQ ID NO: 26 or SEQ ID NO: 29 linked to the C-terminal amino acid of SEQ ID NO: 33 or SEQ ID NO: 34. In another embodiment the glucagon peptide comprises the sequence of SEQ ID NO: 19, wherein a PEG chain is covalently linked to the side chain of the amino acid at position 30 of the glucagon peptide and the peptide further comprises a C-terminal extension of SEQ ID NO: 26 or SEQ ID NO: 29 linked to the C-terminal amino acid of SEQ ID NO: 19.

[0695] The polyethylene glycol chain may be in the form of a straight chain or it may be branched. In accordance with some embodiments the polyethylene glycol chain has an average molecular weight selected from the range of about 500 to about 10,000 Daltons. In some embodiments the polyethylene glycol chain has an average molecular weight selected from the range of about 1,000 to about 5,000 Daltons. In an alternative embodiment the polyethylene glycol chain has an average molecular weight selected from the range of about 10,000 to about 20,000 Daltons. In accordance with some embodiments the pegylated glucagon peptide comprises two or more polyethylene glycol chains covalently bound to the glucagon peptide wherein the total molecular weight of the glucagon chains is about 1,000 to about 5,000 Daltons. In some embodiments the pegylated glucagon agonist comprises a peptide consisting of SEQ ID NO: 5 or a glucagon agonist analog of SEQ ID NO: 5, wherein a PEG chain is covalently linked to the amino acid residue at position 21 and at position 24, and wherein the combined molecular weight of the two PEG chains is about 1,000 to about 5,000 Daltons.

[0696] In certain exemplary embodiments, the glucagon peptide comprises the amino acid sequence of SEQ ID NO: 1 with up to ten amino acid modifications and comprises an amino acid at position 10 which is acylated or alkylated. In some embodiments, the amino acid at position 10 is acylated or alkylated with a C4 to C30 fatty acid. In certain aspects, the amino acid at position 10 comprises an acyl group or an alkyl group which is non-native to a naturally-occurring amino acid.

[0697] In certain embodiments, the glucagon peptide comprising an amino acid at position 10 which is acylated or alkylated comprises a stabilized alpha helix. Accordingly, in certain aspects, the glucagon peptide comprises an acyl or alkyl group as described herein and an intramolecular bridge, e.g., a covalent intramolecular bridge (e.g., a lactam bridge) between the side chains of an amino acid at position i and an amino acid at position i+4, wherein i is 12, 16, 20, or 24. Alternatively or additionally, the glucagon peptide comprises an acyl or alkyl group as described herein and one, two, three or more of positions 16, 20, 21 and/or 24 of the glucagon peptide are substituted with an α,α-disubstituted amino acid, e.g., Aib. In some instances, the non-native glucagon peptide comprises Glu at position 16 and Lys at position 20, wherein optionally a lactam bridge lnkes the Glu and the Lys, and, optionally, the glucagon peptide further comprises one or more modifications selected from the group consisting of: Gln at position 17, Ala at position 18, Glu at position 21, Ile at position 23, and Ala at position 24.

[0698] Also, in any of the embodiments, wherein the glucagon peptide comprises an amino acid at position 10 which is acylated or alkylated, the glucagon peptide can further comprise a C-terminal amide in lieu of the C-terminal alpha carboxylate.

[0699] In some embodiments, the glucagon peptide comprising an acyl or alkyl group as described herein further comprises an amino acid substitution at position 1, at position 2, or at positions 1 and 2, wherein the amino acid substitution(s) achieve DPP-IV protease resistance. For example, the His at position 1 may be substituted with an amino acid selected from the group consisting of: D-histidine, alpha, alpha-dimethyl imidiazole acetic acid (DMIA), N-methyl histidine, alpha-methyl histidine, imidazole acetic acid, desaminohistidine, hydroxyl-histidine, acetyl-histidine and homo-histidine. Alternatively or additionally, the Ser at position 2 may be substituted with an amino acid selected from the group consisting of: D-serine, alanine, D-alanine, valine, glycine, N-methyl serine, N-methyl alanine, and amino isobutyric acid. In some embodiments the amino acid at position 2 is not D-serine.

[0700] The glucagon peptide comprising the amino acid at position 10 which is acylated or alkylated as described herein can comprise any amino acid sequence which is substantially related to SEQ ID NO: 1. For instance, the glucagon peptide comprises SEQ ID NO: 1 with up to 10 amino acid modifications (e.g., 0, 1, 2, 3, 4, 5, 6, 7, 8, 9, 10 modifications). In certain embodiments, the amino acid sequence of the acylated or alkylated glucagon peptide is greater than 25% identical to SEQ ID NO: 1 (e.g., greater than 30%, 35%, 40%, 50%, 60%, 70% 75%, 80%, 85%, 90%, 95%, 96%, 97%, 98%, 99%, or nearly 100% identical to SEQ ID NO: 1). In certain specific embodiments, the glucagon peptide is one which comprises SEQ ID NOs: 55 with an amino acid at position 10 acylated or alkylated as described herein. The glucagon peptide can be any of SEQ ID NOs: 55, 55 with 1 or 2 amino acid modifications, 2-4, 9-18, 20, 23-25, 33, 40-44, 53, 56, 61, 62, 64, 66-514, and 534.

[0701] The acyl or alkyl group of these embodiments may be any acyl or alkyl group described herein. For example, the acyl group may be a C4 to C30 (e.g., C8 to C24) fatty acyl group and the alkyl group may be a C4 to C30 (e.g., C8 to C24) alkyl group.

[0702] The amino acid to which the acyl or alkyl group is attached may be any of the amino acids described herein, e.g., an amino acid of any of Formula I (e.g., Lys), Formula II, and Formula III.

[0703] In some embodiments, the acyl group or alkyl group is directly attached to the amino acid at position 10. In some embodiments, the acyl or alkyl group is attached to the amino acid at position 10 via a spacer, such as, for example, a spacer which is 3 to 10 atoms in length, e.g., an amino acid or dipeptide. Suitable spacers for purposes of attaching an acyl or alkyl group are described herein.

[0704] In accordance with some embodiments, the Class 3 glucagon related peptide may be an analog of any of the foregoing Class 3 glucagon related peptides as described herein, which analog exhibits agonist activity at the GIP receptor. The activity level of the analog at the glucagon receptor, the GLP-1 receptor, and the GIP receptor, the potency at each of these receptors, and the selectivity for each of these receptors may be in accordance with the teachings of Class 2 glucagon related peptides described herein. See, the teachings under the subsection of the Class 2 glucagon related peptide section entitled “Activity.”

[0705] In some embodiments of the invention, an analog of a glucagon peptide, which analog exhibits agonist activity at the GIP receptor, is provided. The analog in certain embodiments comprises the amino acid sequence of SEQ ID NO: 1 with at least one amino acid modification (optionally, up to 15 amino acid modifications), and an extension of 1 to 21 amino acids C-terminal to the amino acid at position 29 of the analog.

[0706] In certain aspects, the analogs comprise at least one amino acid modification and up to 15 amino acid modifications (e.g., 1, 2, 3, 4, 5, 6, 7, 8, 9, 10, 11, 12, 13, 14, 15 amino acid modifications, up to 10 amino acid modifications). In certain embodiments, the analogs comprise at least one amino acid modification at up to 10 amino acid modifications and additional conservative amino acid modifications. Conservative amino acid modifications are described herein.

[0707] In some aspects, at least one of the amino acid modifications confers a stabilized alpha helix structure in the C-terminal portion of the analog. Modifications which achieve a stabilized alpha helix structure are described herein. See, for example, the teachings under the section entitled Stabilization of the alpha helix/Intramolecular bridges. In some aspects, the analog comprises an intramolecular bridge (e.g., a covalent intramolecular bridge, a non-covalent intramolecular bridge) between the side chains of two amino acids of the analog. In certain aspects, an intramolecular bridge links the side chains of the amino acids at positions i and i+4, wherein i is 12, 13, 16, 17, 20, or 24. In other aspects, an intramolecular bridge connects the side chains of the amino acids at positions j and j+3, wherein j is 17, or at positions k and k+7″ wherein k is any integer between 12 and 22. In certain embodiments, the intramolecular bridge is a covalent intramolecular bridge, e.g., a lactam bridge. In specific aspects, the lactam bridge connects the side chains of the amino acids at positions 16 and 20. In particular aspects, one of the amino acids at positions 16 and 20 is a positive-charged amino acid and the other is a negative-charged amino acid. For example, the analog can comprise a lactam bridge connecting the side chains of a Glu at position 16 and a Lys at position 20. In other aspects, the negative-charged amino acid and the positive-charged amino acid form a salt bridge. In this instance, the intramolecular bridge is a non-covalent intramolecular bridge.

[0708] In particular aspects, the amino acid modification which confers a stabilized alpha helix is an insertion or substitution of an amino acid of SEQ ID NO: 1 with an α,α-disubstituted amino acid. Suitable α,α-disubstituted amino acids for purposes of stabilizing the alpha helix are described herein and include, for example, Aib. In some aspects, one, two, three, or more of the amino acids at positions 16, 20, 21, and 24 of SEQ ID NO: 1 are substituted with an α,α-disubstituted amino acid, e.g., Aib. In particular embodiments, the amino acid at position 16 is Aib.

[0709] The analog which exhibits agonist activity at the GIP receptor can comprise additional modifications, such as any of those described herein. For instance, the amino acid modifications may increase or decrease activity at one or both of the GLP-1 receptor and glucagon receptor. The amino acid modifications may increase stability of the peptide, e.g., increase resistance to DPP-IV protease degradation, stabilize the bond between amino acids 15 and 16. The amino acid modifications may increase the solubility of the peptide and/or alter the time of action of the analog at any of the GIP, glucagon, and GLP-1 receptors. A combination of any of these types of modifications may be present in the analogs which exhibit agonist activity at the GIP receptor.

[0710] Accordingly, in some aspects, the analog comprises the amino acid sequence of SEQ ID NO: 1 with one or more of: Gln at position 17, Ala at position 18, Glu at position 21, Ile at position 23, and Ala or Cys at position 24, or conservative amino acid substitutions thereof. In some aspects, the analog comprises a C-terminal amide in place of the C-terminal alpha carboxylate. In certain embodiments, the analog comprises an amino acid substitution at position 1, position 2, or positions 1 and 2, which substitution(s) achieve DPP-IV protease resistance. Suitable amino acid substitutions are described herein. For example, DMIA at position 1 and/or d-Ser or Aib at position 2. In some embodiments, the amino acid at position 2 is not D-serine.

[0711] Additionally or alternatively, the analog may comprise one or a combination of: (a)

[0712] Ser at position 2 substituted with Ala; (b) Gln at position 3 substituted with Glu or a glutamine analog; (c) Thr at position 7 substituted with a Ile; (d) Tyr at position 10 substituted with Trp or an amino acid comprising an acyl or alkyl group which is non-native to a naturally-occurring amino acid; (e) Lys at position 12 substituted with Ile; (f) Asp at position 15 substituted with Glu; (g) Ser at position 16 substituted with Glu; (h) Gln at position 20 substituted with Ser, Thr, Ala, Aib; (i) Gln at position 24 substituted with Ser, Thr, Ala, Aib; (j) Met at position 27 substituted with Leu or Nle; (k) Asn at position 29 substituted with a charged amino acid, optionally, Asp or Glu; and (l) Thr at position 29 substituted with Gly or a charged amino acid, optionally, Asp or Glu.

[0713] With regard to the analogs which exhibit agonist activity at the GIP receptor, the analog comprises an extension of 1-21 amino acids (e.g., 5-19, 7-15, 9-12 amino acids). The extension of the analog may comprise any amino acid sequence, provided that the extension is 1 to 21 amino acids. In some aspects, the extension is 7 to 15 amino acids and in other aspects, the extension is 9 to 12 amino acids. In some embodiments, the extension comprises (i) the amino acid sequence of SEQ ID NO: 26 or 674, (ii) an amino acid sequence which has high sequence identity (e.g., at least 80%, 85%, 90%, 95%, 98%, 99%) with the amino acid sequence of SEQ ID NO: 26 or 674, or (iii) the amino acid sequence of (i) or (ii) with one or more conservative amino acid modifications.

[0714] In some embodiments, at least one of the amino acids of the extension is acylated or alkylated. The amino acid comprising the acyl or alkyl group may be located at any position of extension of the analog. In certain embodiments, the acylated or alkylated amino acid of the extension is located at one of positions 37, 38, 39, 40, 41, or 42 (according to the numbering of SEQ ID NO: 1) of the analog. In certain embodiments, the acylated or alkylated amino acid is located at position 40 of the analog.

[0715] In exemplary embodiments, the acyl or alkyl group is an acyl or alkyl group which is non-native to a naturally-occurring amino acid. For example, the acyl or alkyl group may be a C4 to C30 (e.g., C12 to C18) fatty acyl group or C4 to C30 (e.g., C12 to C18) alkyl. The acyl or alkyl group may be any of those discussed herein.

[0716] In some embodiments, the acyl or alkyl group is attached directly to the amino acid, e.g., via the side chain of the amino acid. In other embodiments, the acyl or alkyl group is attached to the amino acid via a spacer (e.g., an amino acid, a dipeptide, a tripeptide, a hydrophilic bifunctional spacer, a hydrophobic bifunctional spacer). In certain aspects, the spacer is 3 to 10 atoms in length. In some embodiments, the amino acid spacer is not γ-Glu. In some embodiments, the dipeptide spacer is not γ-Glu-γ-Glu.

[0717] Also, in exemplary embodiments, the amino acid to which the acyl or alkyl group is attached may be any of those described herein, including, for example, an amino acid of Formula I, II, or III. The amino acid which is acylated or alkylated may be a Lys, for example. Suitable amino acids comprising an acyl or alkyl group, as well as suitable acyl groups and alkyl groups, are described herein. See, for example, the teachings under the sections entitled Acylation and Alkylation.

[0718] In other embodiments, 1-6 amino acids (e.g., 1-2, 1-3, 1-4, 1-5 amino acids) of the extension are positive-charged amino acids, e.g., amino acids of Formula IV, such as, for example, Lys. As used herein, the term “positive-charged amino acid” refers to any amino acid, naturally-occurring or non-naturally occurring, comprising a positive charge on an atom of its side chain at a physiological pH. In certain aspects, the positive-charged amino acids are located at any of positions 37, 38, 39, 40, 41, 42, and 43. In specific embodiments, a positive-charged amino acid is located at position 40.

[0719] In other instances, the extension is acylated or alkylated as described herein and comprises 1-6 positive charged amino acids as described herein.

[0720] In yet other embodiments, the analogs which exhibit agonist activity at the GIP receptor comprises (i) SEQ ID NO: 1 with at least one amino acid modification, (ii) an extension of 1 to 21 amino acids (e.g., 5 to 18, 7 to 15, 9 to 12 amino acids) C-terminal to the amino acid at position 29 of the analog, and (iii) an amino acid comprising an acyl or alkyl group which is non-native to a naturally-occurring amino acid which is located outside of the C-terminal extension (e.g., at any of positions 1-29). In some embodiments, the analog comprises an acylated or alkylated amino acid at position 10. In particular aspects, the acyl or alkyl group is a C4 to C30 fatty acyl or C₄ to C₃₀ alkyl group. In some embodiments, the acyl or alkyl group is attached via a spacer, e.g., an amino acid, dipeptide, tripeptide, hydrophilic bifunctional spacer, hydrophobic bifunctional spacer). In certain aspects, the analog comprises an amino acid modification which stabilizes the alpha helix, such as a salt bridge between a Glu at position 16 and a Lys at position 20, or an alpha, alpha-disubstituted amino acid at any one, two, three, or more of positions 16, 20, 21, and 24. In specific aspects, the analog additionally comprises amino acid modifications which confer DPP-IV protease resistance, e.g., DMIA at position 1, Aib at position 2. Analogs comprising further amino acid modifications are contemplated herein.

[0721] In certain embodiments, the analogs having GIP receptor activity exhibit at least 0.1% (e.g., at least 0.5%, 1%, 2%, 5%, 10%, 15%, or 20%) activity of native GIP at the GIP receptor. In some embodiments, the analogs exhibit more than 20% (e.g., more than 50%, more than 75%, more than 100%, more than 200%, more than 300%, more than 500%) activity of native GIP at the GIP receptor. In some embodiments, the analog exhibits appreciable agonist activity at one or both of the GLP-1 and glucagon receptors. In some aspects, the selectivity for these receptors (GIP receptor and GLP-1 receptor and/or glucagon receptor) are within 1000-fold. For example, the selectivity for the GLP-1 receptor of the analogs having GIP receptor activity can be less than 500-fold, 100-fold, within 50-fold, within 25 fold, within 15 fold, within 10 fold) the selectivity for the GIP receptor and/or the glucagon receptor.

[0722] In accordance with some embodiments, the Class 3 glucagon related peptide comprises the amino acid sequence of native glucagon (SEQ ID NO: 1) comprising the following modifications: Aib at position 2, Glu at position 3, Lys at position 10, Glu at position 16, Gln at position 17, Ala at position 18, Lys at position 20, Glu at position 21, Ile at position 23, Ala at position 24; wherein Lys at position 10 is acylated with a C14 or C16 fatty acid, and wherein the C-terminal carboxylate is replaced with an amide. In a specific embodiment, this Class 3 glucagon related peptide is attached via a linker (L) to a GR ligand (Y).

[0723] In accordance with some embodiments, the Class 3 glucagon related peptide comprises, consists essentially of, or consists of an amino acid sequence of any of SEQ ID NOs: 70-514, 517-534, or 554, optionally with up to 1, 2, 3, 4, or 5 further modifications that retain GLP-1 agonist and/or glucagon agonist activity. In certain embodiments, the Class 3 glucagon related peptide comprises the amino acids of any of SEQ ID NOs: 562-760. In some embodiments, the Class 3 glucagon related peptide comprises the amino acid sequences of any of SEQ ID NOs: 1301-1421.

### Class 4 Glucagon Related Peptides

[0724] In certain embodiments, Q is a Class 4 glucagon related peptide (see, e.g., International (PCT) Patent Application Publication No. WO 2009/058662, incorporated herein by reference in its entirety.

[0725] All biological sequences referenced in the following section (SEQ ID NOs: 1301-1371) correspond to SEQ ID NOs: 1-71 in WO 2009/058662.

### Activity

[0726] In accordance with some embodiments, Class 4 glucagon related peptides are provided (hereafter referred to as “Class 4 peptides”). In certain aspects a Class 4 peptide is provided which has glucagon antagonist activity. A glucagon antagonists would be used in any setting where the suppression of glucagon agonism is desired. The most immediate and obvious use would be in the treatment of diabetes where glucagon antagonism has been demonstrated in pre-clinical models of hyperglycemia to yield a lowering of blood glucose. Glucagon antagonists can be further modified to improve the biophysical stability and/or aqueous solubility of the compounds while maintaining the antagonist activity of the parent compound. In certain aspects a Class 4 peptide is defined as a pure glucagon antagonist.

[0727] The term “glucagon antagonist” refers to a compound that counteracts glucagon activity or prevents glucagon function. For example, a glucagon antagonist exhibits at least 60% inhibition (e.g., at least 70% inhibition) and preferably, at least 80% inhibition, of the maximum response achieved by glucagon at the glucagon receptor. In some embodiments, the glucagon antagonist exhibits at least 90% inhibition of the maximum response achieved by glucagon at the glucagon receptor. In a specific embodiment, the glucagon antagonist exhibits 100% inhibition of the maximum response achieved by glucagon at the glucagon receptor. Additionally, a glucagon antagonist at a concentration of about 1 μM exhibits less than about 20% of the maximum agonist activity achieved by glucagon at the glucagon receptor. In some embodiments, the glucagon antagonist exhibits less than about 10% of the maximum agonist activity achieved by glucagon at the glucagon receptor. In a specific embodiment, the glucagon antagonist exhibits less than about 5% of the maximum agonist activity achieved by glucagon at the glucagon receptor. In yet another specific embodiment, the glucagon antagonist exhibits 0% of the maximum agonist activity achieved by glucagon at the glucagon receptor.

[0728] A “pure glucagon antagonist” is a glucagon antagonist that does not produce any detected stimulation of glucagon or GLP-1 receptor activity, as measured by cAMP production using a validated in vitro model assay (see, e.g., WO 2009/058662). For example, a pure glucagon antagonist exhibits less than about 5% (e.g., less than about 4%, less than about 3%, less than about 2%, less than about 1%, about 0%) of the maximum agonist activity achieved by glucagon at the glucagon receptor and exhibits less than about 5% (e.g., less than about 4%, less than about 3%, less than about 2%, less than about 1%, and about 0%) of the maximum agonist activity achieved by GLP-1 at the GLP-1 receptor.

[0729] Accordingly, in some aspects, there is provided Class 4 peptides that exhibit pure glucagon antagonist activity. In accordance with some embodiments the glucagon antagonist exhibits activity that reduces glucagon receptor glucagon-induced cAMP production by a maximum of at least 50% when the glucagon receptor is contacted simultaneously with 0.8 nM of glucagon and the glucagon antagonist, as measured by cAMP production in an in vitro assay. In some embodiments, the glucagon antagonist reduces glucagon receptor glucagon-induced cAMP production by a maximum amount of at least 80%.

[0730] Class 4 peptides are believed to be suitable for any use that has previously been described for glucagon antagonists. Accordingly, the Class 4 peptides described herein can be used to treat hyperglycemia, or treat other metabolic diseases that result from high blood levels of glucagon or high blood glucose levels. In accordance with some embodiments the patient to be treated using the Class 4 peptides disclosed herein is a domesticated animal, and in another embodiment the patient to be treated is a human. Studies suggest that lack of glucagon suppression in diabetic patients contributes to postprandial hyperglycemia in part via accelerated glycogenolysis. Analysis of blood glucose during an Oral Glucose Tolerance Test (OGTT), and in the presence or absence of somatostatin-induced glucagon suppression, has shown a significant increase in glucose in subjects with higher glucagon levels. Accordingly, the Class 4 peptides of the present invention can be used to treat hyperglycemia, and are expected to be useful for treating a variety of types of diabetes including diabetes mellitus type I, diabetes mellitus type II, or gestational diabetes, either insulin-dependent or non-insulin-dependent, and reducing complications of diabetes including nephropathy, retinopathy and vascular disease.

[0731] In some embodiments the terminal ten amino acids of Exendin-4 (i.e. the sequence of SEQ ID NO: 1319 (GPSSGAPPPS)) are linked to the carboxy terminus of a Class 4 peptide. These fusion proteins are anticipated to have pharmacological activity for suppressing appetite and inducing weight loss/weight maintenance. In accordance with some embodiments the Class 4 peptides disclosed herein can be further modified to include the amino acid sequence of SEQ ID NO: 1319 (GPSSGAPPPS) linked to amino acid 24 of the Class 4 peptide of SEQ ID NO: 1342 and administered to individuals to induce weight loss or assist in weight maintenance. More particularly, the Class 4 peptide comprises a sequence selected from the group consisting of SEQ ID NO: 1302, SEQ ID NO: 1303, SEQ ID NO: 1304 SEQ ID NO: 1305, SEQ ID NO: 1306, SEQ ID NO: 1307, SEQ ID NO: 1308, SEQ ID NO: 1336, SEQ ID NO: 1339, SEQ ID NO: 1340 SEQ ID NO: 1341, SEQ ID NO: 1342, SEQ ID NO: 1343 and SEQ ID NO: 1344 and further comprising the amino acid sequence of SEQ ID NO: 1319 (GPSSGAPPPS) linked to amino acid 24 of the Class 4 peptide is used to suppress appetite and inducing weight loss/weight maintenance. In some embodiments the administered Class 4 peptide comprises the sequence of SEQ ID NO: 1346 or SEQ ID NO: 1347.

[0732] Such methods for reducing appetite or promoting loss of body weight are expected to be useful in reducing body weight, preventing weight gain, or treating obesity of various causes, including drug-induced obesity, and reducing complications associated with obesity including vascular disease (coronary artery disease, stroke, peripheral vascular disease, ischemia reperfusion, etc.), hypertension, onset of diabetes type II, hyperlipidemia and musculoskeletal diseases.

[0733] The Class 4 peptides of the invention may be administered alone or in combination with other anti-diabetic or anti-obesity agents. Anti-diabetic agents known in the art or under investigation include insulin, sulfonylureas, such as tolbutamide (Orinase), acetohexamide (Dymelor), tolazamide (Tolinase), chlorpropamide (Diabinese), glipizide (Glucotrol), glyburide (Diabeta, Micronase, Glynase), glimepiride (Amaryl), or gliclazide (Diamicron); meglitinides, such as repaglinide (Prandin) or nateglinide (Starlix); biguanides such as metformin (Glucophage) or phenformin; thiazolidinediones such as rosiglitazone (Avandia), pioglitazone (Actos), or troglitazone (Rezulin), or other PPARγ inhibitors; alpha glucosidase inhibitors that inhibit carbohydrate digestion, such as miglitol (Glyset), acarbose (Precose/Glucobay); exenatide (Byetta) or pramlintide; Dipeptidyl peptidase-4 (DPP-4) inhibitors such as vildagliptin or sitagliptin; SGLT (sodium-dependent glucose transporter 1) inhibitors; or FBPase (fructose 1,6-bisphosphatase) inhibitors.

[0734] Anti-obesity agents known in the art or under investigation include appetite suppressants, including phenethylamine type stimulants, phentermine (optionally with fenfluramine or dexfenfluramine), diethylpropion (Tenuate®), phendimetrazine (Prelu-2®), Bontril®), benzphetamine (Didrex®), sibutramine (Meridia®, Reductil®); rimonabant (Acomplia®), other cannabinoid receptor antagonists; oxyntomodulin; fluoxetine hydrochloride (Prozac); Qnexa (topiramate and phentermine), Excalia (bupropion and zonisamide) or Contrave (bupropion and naltrexone); or lipase inhibitors, similar to xenical (Orlistat) or Cetilistat (also known as ATL-962), or GT 389-255.

[0735] The Class 4 peptides of the present invention can also be administered to patients suffering from catabolic wasting. It is estimated that over half of cancer patients experience catabolic wasting which is characterized by unintended and progressive weight loss, weakness, and low body fat and muscle. The syndrome is equally common in AIDS patients and can also be present in bacterial and parasitic diseases, rheumatoid arthritis, and chronic diseases of the bowel, liver, lungs, and heart. It is usually associated with anorexia and can manifest as a condition in aging or as a result of physical trauma. Catabolic wasting is a symptom that diminishes the quality of life, worsens the underlying condition, and is a major cause of death. Applicants anticipate that the Class 4 peptides disclosed herein can be administered to patients to treat catabolic wasting.

[0736] Pharmaceutical compositions comprising the Class 4 peptides disclosed herein can be formulated and administered to patients to using standard pharmaeuctically acceptable carriers and routes of administration known to those skilled in the art. Accordingly the present disclosure also encompasses pharmaceutical compositions comprising one or more of the Class 4 peptides disclosed herein in combination with a pharmaceutically acceptable carrier. The pharmaceutical compositions may comprise the Class 4 peptides as the sole pharmaceutically active component, or the Class 4 peptides can be combined with one or more additional active agents. In accordance with some embodiments a composition is provided comprising a Class 4 peptide of the present invention and a compound that activates the GLP-1 receptor (such as GLP-1, a GLP-1 analog, an exendin-4 analog, or derivatives thereof). In accordance with some embodiments a composition is provided comprising a Class 4 peptide of the present invention and insulin or an insulin analog. Alternatively, a composition provided for inducing weight loss or preventing weight gain can be provided that comprises the sequence of SEQ ID NO: 1342 further comprising the amino acid sequence of SEQ ID NO: 1319 (GPSSGAPPPS) linked to amino acid 24 of SEQ ID NO: 1342, and an anti-obesity peptide. Suitable anti-obesity peptides include those disclosed in U.S. Pat. Nos. 5,691,309, 6,436,435 or US Patent application 20050176643, and including, but not limited to GLP-1, GIP (Gastric Inhibitory Polypeptide), MP1, PYY, MC-4, Leptin.

### Class 4 Peptide Structure

[0737] In some embodiments Class 4 glucagon related peptides are provided wherein the normally occurring aspartic acid at position nine (of glucagon, SEQ ID NO: 1301) has been substituted with glutamic acid or a cysteic acid-based derivative. More particularly, deletion of the first amino acid (des-His) and substitution of the aspartic acid at position 9 with glutamic acid, in some aspects, produces a Class 4 peptide. Class 4 glucagon related peptides having sulfonic acid substituents substituted at amino acid position nine of glucagon perform similarly to the carboxylic acid-based amino acids but with a few critical differences in relation to physical properties such as solubility. Homocysteic acid (hCysSO3) when substituted for the isosteric glutamic acid at position nine in the conventional des-His, Glu9 Class 4 peptide retains a partial antagonist and weak agonist.

[0738] In some embodiments there is provided a Class 4 peptide wherein the first two to five amino acids are removed, and position 9 (according to the numbering of SEQ ID NO: 1301) is replaced with hCys(SO3), homoglutamic acid, β-homoglutamic acid, or an alkylcarboxylate derivative of cysteine having the structure of:

[chemical structure]

wherein X5 is C1-C4 alkyl, C2-C4 alkenyl, or C2-C4 alkynyl, provides a compound that performs as a hormonal antagonist that is highly specific, potent and without contaminating agonist properties.

[0739] In accordance with some embodiments a Class 4 peptide is provided that comprises a glucagon peptide modified, relative to the wild type sequence of SEQ ID NO: 1301, by the deletion of two to five amino acid residues from the N-terminus and substitution of the aspartic acid residue at position nine of the native protein with a glutamic acid, homoglutamic acid, 3-homoglutamic acid, a sulfonic acid derivative of cysteine, or an alkylcarboxylate derivative of cysteine having the structure of:

[chemical structure]

wherein X₅ is C1-C4 alkyl, C2-C4 alkenyl, or C2-C4 alkynyl.

[0740] In one specific embodiment, the Class 4 peptide comprising the deletion of two to five amino acid residues from the N-terminus and substitution of the Asp at position 9 of the native glucagon, is further modified by up to three amino acid modifications. For example, the Class 4 peptide may comprise one, two, or three conservative amino acid modifications. Alternatively or additionally, the Class 4 peptide may comprise one or more amino acid modifications selected from the group consisting of:

[0741] A. substitution of one or two amino acids at positions 10, 20, and 24, (according to the amino acid numbering of SEQ ID NO: 1301), or the N- or C-terminal amino acid of the Class 4 peptide with an amino acid covalently attached to an acyl group or alkyl group via an ester, ether, thioether, amide, or alkyl amine linkage;

[0742] B. substitution of one or two amino acids at positions 16, 17, 20, 21, and 24 (according to the amino acid numbering of SEQ ID NO: 1301), or the N- or C-terminal amino acid of the Class 4 peptide with an amino acid selected from the group consisting of: Cys, Lys, ornithine, homocysteine, and acetyl-phenylalanine (Ac-Phe), wherein the amino acid of the group is covalently bonded to a hydrophilic moiety;

[0743] C. addition of an amino acid covalently bonded to a hydrophilic moiety to the N- or C-terminus of the Class 4 peptide;

[0744] D. substitutution of Asp at position 15 (according to the numbering of SEQ ID NO: 1301) with cysteic acid, glutamic acid, homoglutamic acid, and homocysteic acid;

[0745] E. substitution of Ser at position 16 (according to the numbering of SEQ ID NO: 1301) with cysteic acid, glutamic acid, homoglutamic acid, and homocysteic acid;

[0746] F. substitution with Aib at one or more of positions 16, 20, 21, and 24 according to the amino acid numbering of SEQ ID NO: 1301;

[0747] G. deletion of the amino acid at position 29 or the amino acids at positions 28 and 29, according to the numbering of SEQ ID NO: 1301;

[0748] H. substitution of each or both of the Asn at position 28 and the Thr at position 29 (according to the amino acid numbering of SEQ ID NO: 1301) with charged amino acids; and/or addition of one to two charged amino acids at the C-terminus of SEQ ID NO: 1301;

[0749] I. substitution of the Met at position 27 (according to the numbering of SEQ ID NO: 1301) with Leu or norleucine;

[0750] J. addition of a peptide having the amino acid sequence of any of SEQ ID NOs: 19-21 and 53 to the C-terminus of SEQ ID NO: 1301; wherein Thr at position 29 (according to the numbering of SEQ ID NO: 1301) is Thr or Gly; and

[0751] K. replacement of the C-terminal carboxylate with an amide or ester.

[0752] In a specific embodiment, the Class 4 peptide comprises an amino acid modification of A, B, or C, as described above, or a combination thereof. In yet another specific embodiment, the Class 4 peptide further comprises an amino acid modification of any of D to K as described above, or a combination thereof, in addition to the amino acid modification(s) of A, B, and/or C.

[0753] In some embodiments the Class 4 peptide comprises a glucagon peptide, wherein the first 5 amino acids have been removed from the N-terminus, and the remaining N-terminal amino group has been replaced with a hydroxyl group (the “PLA6 analog”), producing the peptide of SEQ ID NO: 1339. Applicants have found that substitution of phenyl-lactic acid for phenylalanine in Class 4 peptide analogs that have the first five amino acids deleted and substitution of a glutamic acid at position 9 (relative to native glucagon) further enhances the potency of those Class 4 peptide analogs.

[0754] In some embodiments the Class 4 peptide peptide of SEQ ID NO: 1339 is further modified by substituting the aspartic acid residue at position four (position 9 of the native glucagon) with an amino acid of the general structure:

[chemical structure]

wherein X₆ is C1-C3 alkyl, C2-C3 alkene or C2-C3 alkynyl, and in some embodiments X6 is C1-C3 alkyl, and in another embodiment X6 is C2 alkyl. In some embodiments the Class 4 peptide comprises a glucagon peptide, wherein the first 5 amino acids have been removed from the N-terminus, and the aspartic acid residue at position four (position 9 of the native glucagon) has been substituted with cysteic acid or homocysteic acid. In some embodiments the Class 4 peptide comprises a glucagon peptide comprising an amino acid sequence selected from the group consisting of SEQ ID NO: 1339, SEQ ID NO: 1307 and SEQ ID NO: 1308. In some embodiments the Class 4 peptide comprises an amino acid sequence selected from the group consisting of SEQ ID NO: 1308, wherein the amino acid at position four is homocysteic acid.

[0755] In another embodiment, the Class 4 peptide of SEQ ID NO: 1339 is further modified by substituting the aspartic acid residue at position four (position 9 of the native glucagon) with glutamic acid, homoglutamic acid, β-homoglutamic acid, or an alkylcarboxylate derivative of cysteine having the structure of:

[chemical structure]

wherein X₅ is C1-C4 alkyl, C2-C4 alkenyl, or C2-C4 alkynyl. In a specific embodiment, X₅ is C1 or C2 alkyl.

[0756] However, applicants have discovered that with the substitution of the N-terminal phenylalanine with PLA in a desl-5 glucagon analog (i.e., a glucagon analog having the first five amino acids deleted), further substitution of the native aspartic acid residue at position four (position 9 of the native glucagon) is not required to produce an analog that exhibits pure antagonism. This result is surprising in light of the prior art teachings that the native aspartic acid residue at position four must substituted to produce high affinity and potent antagonists of glucagon (2-29) analogs. The use of the PLA substitution improves the relative potency of the Asp9 analog to a point comparable to that of the Glu9 and hCys(SO₃H)9 analogs.

[0757] Substitution of the phenylalanine residue with other phenylalanine analogs, including 3, 4-2F-phenylalnine (3, 4-2F-Phe), 2-naphthyalanine (2-NaI), N-acyl-phenylalanine (Ac-Phe), alpha-methylhydrocinnamic acid (MCA) and benzylmalonic acid (BMA) did not perform as potently as the PLA substitution.

[0758] Substituting PLA at sites other than at position six (according to the amino acid numbering of native glucagon), including at positions 4 and 5 reveals that the PLA6 analog is an appreciably more potent antagonist than glucagon analogs having a slightly extended N-terminus. The present invention also includes analogs wherein the N-terminal amino group is substituted with an acylated and alkylated “O-terminal” peptides.

[0759] Furthermore, the PLA6 substitution not only increases the potency of the antagonist but also serves a critical role in pegylation. The PLA6 analogs can be selectively pegylated without restoration of glucagon agonism. In the absence of the PLA substitution, pegylation of the analog surprisingly induces glucagon agonism. This glucagon agonism is not seen in the pegylated PLA6 analogs. Several sites for pegylation were investigated including positions 3, 6 and 19 (positions 8, 11 and 19 of native glucagon) and at the N-terminal amino acid residue. In some embodiments the pegylation is at position 19 (position 24 of native glucagon) as that site exhibits the most potent and selective glucagon antagonism.

[0760] In some embodiments, the Class 4 peptide comprises the general structure of A-B-C, wherein A is selected from the group consisting of:

[0761] (i) phenyl lactic acid (PLA);

[0762] (ii) an oxy derivative of PLA;

[0763] (iii) a peptide of 2 to 6 amino acids in which two consecutive amino acids of the peptide are linked via an ester or ether bond;

B represents amino acids i to 26 of SEQ ID NO: 1301, wherein i is 3, 4, 5, 6, or 7, optionally comprising one or more amino acid modifications selected from the group consisting of:

[0764] (iv) Asp at position 9 (according to the amino acid numbering of SEQ ID NO: 1301) is substituted with a Glu, a sulfonic acid derivative of Cys, homoglutamic acid, β-homoglutamic acid, or an alkylcarboxylate derivative of cysteine having the structure of:

[chemical structure]

[0765] wherein X5 is C1-C4 alkyl, C2-C4 alkenyl, or C2-C4 alkynyl.

[0766] (v) substitution of one or two amino acids at positions 10, 20, and 24, (according to the amino acid numbering of SEQ ID NO: 1301) with an amino acid covalently attached to an acyl or alkyl group via an ester, ether, thioether, amide, or alkyl amine linkage;

[0767] (vi) substitution of one or two amino acids at positions 16, 17, 20, 21, and 24 (according to the amino acid numbering of SEQ ID NO: 1301) with an amino acid selected from the group consisting of: Cys, Lys, ornithine, homocysteine, and acetyl-phenylalanine (Ac-Phe), wherein the amino acid of the group is covalently attached to a hydrophilic moiety;

[0768] (vii) Asp at position 15 (according to the numbering of SEQ ID NO: 1301) is substituted with cysteic acid, glutamic acid, homoglutamic acid, and homocysteic acid;

[0769] (viii) Ser at position 16 (according to the numbering of SEQ ID NO: 1301) is substituted with cysteic acid, glutamic acid, homoglutamic acid, and homocysteic acid;

[0770] (ix) substitution with Aib at one or more of positions 16, 20, 21, and 24 according to the amino acid numbering of SEQ ID NO: 1301;

and C is selected from the group consisting of:

[0771] (x) X;

[0772] (xi) X—Y;

[0773] (xii) X—Y—Z; and

[0774] (xiii) X—Y—Z—R10,

[0775] wherein X is Met, Leu, or Nle; Y is Asn or a charged amino acid; Z is Thr, Gly, Cys, Lys, ornithine (Orn), homocysteine, acetyl phenylalanine (Ac-Phe), or a charged amino acid; wherein R10 is selected from a group consisting of SEQ ID NOs: 1319-1321 and 1353; and

[0776] (xiv) any of (x) to (xiii) in which the C-terminal carboxylate is replaced with an amide.

[0777] In a specific aspect, the Class 4 peptide comprises an oxy derivative of PLA. As used herein “oxy derivative of PLA” refers to a compound comprising a modified structure of PLA in which the hydroxyl group has been replaced with O—R₁₁, wherein R₁₁ is a chemical moiety. In this regard, the oxy derivative of PLA can be, for example, an ester of PLA or an ether of PLA.

[0778] Methods of making oxy derivatives of PLA are known in the art. For example, when the oxy derivative is an ester of PLA, the ester may be formed by upon reaction of the hydroxyl of PLA with a carbonyl bearing a nucleophile. The nucleophile can be any suitable nucleophile, including, but not limited to an amine or hydroxyl. Accordingly, the ester of PLA can comprise the structure of Formula IV:

[chemical structure]

wherein R₇ is an ester formed upon reaction of the hydroxyl of PLA with a carbonyl bearing a nucleophile.

[0779] The carbonyl bearing a nucleophile (which reacts with the hydroxyl of PLA to form an ester) can be, for example, a carboxylic acid, a carboxylic acid derivative, or an activated ester of a carboxylic acid. The carboxylic acid derivative can be, but is not limited to, an acyl chloride, an acid anhydride, an amide, an ester, or a nitrile. The activated ester of a carboxylic acid can be, for example, N-hydroxysuccinimide (NHS), tosylate (Tos), a carbodiimide, or a hexafluorophosphate. In some embodiments, the carbodiimide is 1,3-dicyclohexylcarbodiimide (DCC), 1,1′-carbonyldiimidazole (CDI), 1-ethyl-3-(3-dimethylaminopropyl)carbodiimide hydrochloride (EDC), or 1,3-diisopropylcarbodiimide (DICD). In some embodiments, the hexafluorophosphate is selected from a group consisting of hexafluorophosphate benzotriazol-1-yl-oxy-tris(dimethylamino)phosphonium hexafluorophosphate (BOP), benzotriazol-1-yl-oxytripyrrolidinophosphonium hexafluorophosphate (PyBOP), 2-(1H-7-azabenzotriazol-1-yl)-1,1,3,3-tetramethyl uronium hexafluorophosphate (HATU), and o-benzotriazole-N,N,N′,N′-tetramethyl-uronium-hexafluoro-phosphate (HBTU).

[0780] Methods of making ethers from reaction with a hydroxyl group (e.g., the hydroxyl of PLA) also are known in the art. For example, the hydroxyl group of PLA may be reacted with a halogenated alkyl or tosylated alkyl alcohol to form an ether bond.

[0781] Generally, the chemical moiety of R₁₁ is one which does not decrease the activity of the Class 4 peptide. In some embodiments, the chemical moiety enhances the activity, stability, and/or solubility of the Class 4 peptide.

[0782] In a specific embodiment, the chemical moiety bound to PLA via an oxygen-containing bond (e.g., via an ester or ether bond) is a polymer (e.g., a polyalkylene glycol), a carbohydrate, an amino acid, a peptide, or a lipid, e.g., a fatty acid or a steroid.

[0783] In a specific embodiment, the chemical moiety is an amino acid, which, optionally, is a part of a peptide, such that Formula IV is a depsipeptide. In this regard, PLA may be at a position other than the N-terminal amino acid residue of the Class 4 peptide, such that the Class 4 peptide comprises one or more (e.g., 1, 2, 3, 4, 5, 6, or more) amino acids N-terminal to the PLA residue. For example, the Class 4 peptide can comprise PLA at position n, wherein n is 2, 3, 4, 5, or 6 of the Class 4 peptide.

[0784] The amino acids N-terminal to the PLA residue may be synthetic or naturally-occurring. In a specific embodiment, the amino acids which are N-terminal PLA are naturally-occurring amino acids. In some embodiments, the amino acids which are N-terminal to PLA are the N-terminal amino acids of native glucagon. For example, the Class 4 peptide can comprise at the N-terminus the amino acid sequence of any of SEQ ID NOs: 1354-1358, wherein PLA is linked to threonine via an ester bond:

SEQ ID NO: 1354
His-Ser-Gln-Gly-Thr-PLA
SEQ ID NO: 1355
Ser-Gln-Gly-Thr-PLA
SEQ ID NO: 1356
Gln-Gly-Thr-PLA
SEQ ID NO: 1357
Gly-Thr-PLA
SEQ ID NO: 1358
Thr-PLA

[0785] In an alternative embodiment, one or more of the N-terminal amino acids may be substituted with an amino acid other than the amino acid of native glucagon. For example, when the Class 4 peptide comprises PLA as the amino acid at position 5 or 6, the amino acid at position 1 and/or position 2 may be an amino acid which reduces susceptibility to cleavage by dipeptidyl peptidase IV. More particularly, in some embodiments, position 1 of the Class 4 peptide is an amino acid selected from the group consisting of D-histidine, alpha, alpha-dimethyl imidiazole acetic acid (DMIA), N-methyl histidine, alpha-methyl histidine, imidazole acetic acid, desaminohistidine, hydroxyl-histidine, acetyl-histidine and homo-histidine. More particularly, in some embodiments, position 2 of the antagonist peptide is an amino acid selected from the group consisting of D-serine, D-alanine, valine, glycine, N-methyl serine, N-methyl alanine, and aminoisobutyric acid (Aib). Also, for example, when the Class 4 peptide comprises PLA as the amino acid at position 4, 5, or 6, the amino acid at position 3 of the Class 4 peptide may be glutamic acid, as opposed to the native glutamine residue of native glucagon. In an exemplary embodiment of the invention, the Class 4 peptide comprises at the N-terminus the amino acid sequence of any of SEQ ID NOs: 1359-1361.

[0786] With respect to the Class 4 peptides comprising a compound of Formula IV, the polymer may be any polymer, provided that it can react with the hydroxyl group of PLA. The polymer may be one that naturally or normally comprises a carbonyl bearing a nucleophile. Alternatively, the polymer may be one which was derivatized to comprise the carbonyl bearing the carbonyl. The polymer may be a derivatized polymer of any of: polyamides, polycarbonates, polyalkylenes and derivatives thereof including, polyalkylene glycols, polyalkylene oxides, polyalkylene terepthalates, polymers of acrylic and methacrylic esters, including poly(methyl methacrylate), poly(ethyl methacrylate), poly(butylmethacrylate), poly(isobutyl methacrylate), poly(hexylmethacrylate), poly(isodecyl methacrylate), poly(lauryl methacrylate), poly(phenyl methacrylate), poly(methyl acrylate), poly(isopropyl acrylate), poly(isobutyl acrylate), and poly(octadecyl acrylate), polyvinyl polymers including polyvinyl alcohols, polyvinyl ethers, polyvinyl esters, polyvinyl halides, poly(vinyl acetate), and polyvinylpyrrolidone, polyglycolides, polysiloxanes, polyurethanes and co-polymers thereof, celluloses including alkyl cellulose, hydroxyalkyl celluloses, cellulose ethers, cellulose esters, nitro celluloses, methyl cellulose, ethyl cellulose, hydroxypropyl cellulose, hydroxy-propyl methyl cellulose, hydroxybutyl methyl cellulose, cellulose acetate, cellulose propionate, cellulose acetate butyrate, cellulose acetate phthalate, carboxylethyl cellulose, cellulose triacetate, and cellulose sulphate sodium salt, polypropylene, polyethylenes including poly(ethylene glycol), poly(ethylene oxide), and poly(ethylene terephthalate), and polystyrene.

[0787] The polymer can be a biodegradable polymer, including a synthetic biodegradable polymer (e.g., polymers of lactic acid and glycolic acid, polyanhydrides, poly(ortho)esters, polyurethanes, poly(butic acid), poly(valeric acid), and poly(lactide-cocaprolactone)), and a natural biodegradable polymer (e.g., alginate and other polysaccharides including dextran and cellulose, collagen, chemical derivatives thereof (substitutions, additions of chemical groups, for example, alkyl, alkylene, hydroxylations, oxidations, and other modifications routinely made by those skilled in the art), albumin and other hydrophilic proteins (e.g., zein and other prolamines and hydrophobic proteins)), as well as any copolymer or mixture thereof. In general, these materials degrade either by enzymatic hydrolysis or exposure to water in vivo, by surface or bulk erosion.

[0788] The polymer can be a bioadhesive polymer, such as a bioerodible hydrogel described by H. S. Sawhney, C. P. Pathak and J. A. Hubbell in Macromolecules, 1993, 26, 581-587, the teachings of which are incorporated herein, polyhyaluronic acids, casein, gelatin, glutin, polyanhydrides, polyacrylic acid, alginate, chitosan, poly(methyl methacrylates), poly(ethyl methacrylates), poly(butylmethacrylate), poly(isobutyl methacrylate), poly(hexylmethacrylate), poly(isodecyl methacrylate), poly(lauryl methacrylate), poly(phenyl methacrylate), poly(methyl acrylate), poly(isopropyl acrylate), poly(isobutyl acrylate), and poly(octadecyl acrylate).

[0789] In some embodiments, the polymer is a water-soluble polymer. Suitable water-soluble polymers are known in the art and include, for example, polyvinylpyrrolidone, hydroxypropyl cellulose (HPC; Klucel), hydroxypropyl methylcellulose (HPMC; Methocel), nitrocellulose, hydroxypropyl ethylcellulose, hydroxypropyl butylcellulose, hydroxypropyl pentylcellulose, methyl cellulose, ethylcellulose (Ethocel), hydroxyethyl cellulose, various alkyl celluloses and hydroxyalkyl celluloses, various cellulose ethers, cellulose acetate, carboxymethyl cellulose, sodium carboxymethyl cellulose, calcium carboxymethyl cellulose, vinyl acetate/crotonic acid copolymers, poly-hydroxyalkyl methacrylate, hydroxymethyl methacrylate, methacrylic acid copolymers, polymethacrylic acid, polymethylmethacrylate, maleic anhydride/methyl vinyl ether copolymers, poly vinyl alcohol, sodium and calcium polyacrylic acid, polyacrylic acid, acidic carboxy polymers, carboxypolymethylene, carboxyvinyl polymers, polyoxyethylene polyoxypropylene copolymer, polymethylvinylether co-maleic anhydride, carboxymethylamide, potassium methacrylate divinylbenzene co-polymer, polyoxyethyleneglycols, polyethylene oxide, and derivatives, salts, and combinations thereof.

[0790] In a specific embodiment, the polymer is a polyalkylene glycol, including, for example, polyethylene glycol (PEG).

[0791] The carbohydrate may be any carbohydrate provided that it comprises or is made to comprise a carbonyl with an alpha leaving group. The carbohydrate, for example, may be one which has been derivatized to comprise a carbonyl with an alpha leaving group. In this regard, the carbohydrate may be a derivatized form of a monosaccharide (e.g., glucose, galactose, fructose), a disaccharide (e.g., sucrose, lactose, maltose), an oligosaccharide (e.g., raffinose, stachyose), a polysaccharide (a starch, amylase, amylopectin, cellulose, chitin, callose, laminarin, xylan, mannan, fucoidan, galactomannan.

[0792] With respect to the Class 4 peptides comprising a compound of Formula IV, the lipid may be any lipid comprising a carbonyl with an alpha leaving group. The lipid, for example, may be one which is derivatized to comprise the carbonyl. In this regard, the lipid, may be a derivative of a fatty acid (e.g., a C4-C30 fatty acid, eicosanoid, prostaglandin, leukotriene, thromboxane, N-acyl ethanolamine), glycerolipid (e.g., mono-, di-, tri-substituted glycerols), glycerophospholipid (e.g., phosphatidylcholine, phosphatidylinositol, phosphatidylethanolamine, phosphatidylserine), sphingolipid (e.g., sphingosine, ceramide), sterol lipid (e.g., steroid, cholesterol), prenol lipid, saccharolipid, or a polyketide. In some embodiments, the lipid is a oil, wax, cholesterol, sterol, fat-soluble vitamin, monoglyceride, diglyceride, triglyceride, a phospholipid.

[0793] In some embodiments, R₇ has a molecular weight of about 100 kDa or less, e.g., about 90 kDa or less, about 80 kDa or less, about 70 kDa or less, about 60 kDa or less, about 50 kDa or less, about 40 kDa or less. Accordingly, R7 can have a molecular weight of about 35 kDa or less, about 30 kDa or less, about 25 kDa or less, about 20 kDa or less, about 15 kDa or less, about 10 kDa or less, about 5 kDa or less, or about 1 kDa.

[0794] In an alternative embodiment, the Class 4 peptide comprises as A, a peptide of 2 to 6 amino acids in which two consecutive amino acids of the peptide are linked via an ester or ether bond. The ester or ether bond may be, e.g., between amino acids 2 and 3, 3 and 4, 4 and 5, or 5 and 6. Optionally the peptide may be further modified by covalent linkage to another chemical moiety including linkage to a polymer (e.g. a hydrophilic polymer), alkylation, or acylation.

[0795] With regard to the Class 4 peptide comprising the general structure A-B-C, B represents amino acids of native glucagon, e.g., i to 26 of SEQ ID NO: 1301, wherein i is 3, 4, 5, 6, or 7, optionally comprising one or more amino acid modifications. In a specific embodiment, B represents amino acids 7 to 26 of SEQ ID NO: 1301, optionally further modified.

[0796] In some embodiments, B is modified by up to three amino acid modifications. For example, B, which represents native amino acid sequence of SEQ ID NO: 1301 is modified by one or more conservative amino acid modifications.

[0797] In another embodiment, B comprises one or more amino acid modifications selected from the group consisting of (iv) to (ix), as described herein. In a specific embodiment, B comprises one or both of the amino acid modifications (v) and (vi). In a further specific embodiment, B comprises one or a combination of amino acid modifications selected from the group consisting of (iv), (vii), (viii), and (ix), in addition to (v) and (vi).

[0798] In another specific embodiment, the Class 4 peptide comprises one or more charged amino acids at the C-terminus. For example, Y and/or Z can be a charged amino acid, e.g., Lys, Arg, His, Asp, and Glu. In yet another embodiment, the Class 4 peptide comprises one to two charged amino acids (e.g., Lys, Arg, His, Asp, and Glu) C-terminal to Z. In a specific aspect, Z followed by one to two charged amino acids does not comprise R10.

[0799] The Class 4 peptide in some embodiments comprises a hydrophilic moiety covalently bound to an amino acid residue of the Class 4 peptide, as described herein. For example, the Class 4 peptide can comprise a hydrophilic moiety covalently attached to an amino acid at position 1, 16, 20, 21, or 24 according to the numbering of SEQ ID NO: 1301. In another embodiment, the hydrophilic moiety is attached to the C-terminal amino acid of the Class 4 peptide, which in some cases, is 1 or 11 amino acids C-terminal to Z. In yet another embodiment, the hydrophilic moiety is attached to PLA, when A is PLA, PLA-Phe, or PLA-Thr-Phe, wherein PLA is modified to comprise the hydrophilic moiety. In another embodiment, an amino acid comprising a hydrophilic moiety is added to the N- or C-terminus of the Class 4 peptide. In another embodiment, the Class 4 peptide comprises an acyl group or alkyl group as described herein. For example, the acylation or alkylation can occur off the side chain of the amino acid at position 10, 20, or 24, according to the numbering of SEQ ID NO: 1301. In an alternative embodiment, the acylation or alkylation occurs off the side chain of the C-terminal amino acid of the Class 4 peptide, which in some cases, is 1 or 11 amino acids C-terminal to Z. In yet another embodiment, when A is PLA, PLA-Phe, or PLA-Thr-Phe, the PLA is modified to comprise an acyl or alkyl group.

### Exemplary Embodiments

[0800] The Class 4 peptide may comprise any amino acids, synthetic or naturally occurring, provided that at least two consecutive amino acids of the peptide are linked via an ester or ether bond. In a specific embodiment, the peptide comprises amino acids of native glucagon. For example, the peptide can comprise j to 6 of native glucagon (SEQ ID NO: 1301), wherein j is 1, 2, 3, 4, or 5. Alternatively, the peptide can comprise an amino acid sequence based on the N-terminus of SEQ ID NO: 1301 with one or more amino acid modifications. The amino acid at position 1 and/or position 2 may be an amino acid which reduces susceptibility to cleavage by dipeptidyl peptidase IV. For instance, the peptide can comprise at position 1 of the Class 4 peptide an amino acid selected from the group consisting of D-histidine, alpha, alpha-dimethyl imidiazole acetic acid (DMIA), N-methyl histidine, alpha-methyl histidine, imidazole acetic acid, desaminohistidine, hydroxyl-histidine, acetyl-histidine and homo-histidine. More particularly, in some embodiments, position 2 of the antagonist peptide is an amino acid selected from the group consisting of D-serine, D-alanine, valine, glycine, N-methyl serine, N-methyl alanine, and aminoisobutyric acid (Aib). Also, for example, the amino acid at position 3 of the Class 4 peptide may be glutamic acid, as opposed to the native glutamine residue of native glucagon. Accordingly, the Class 4 peptide can comprise an amino acid sequence of:

(SEQ ID NO: 1368)
Xaa1-Xaa2-Xaa3-Thr-Gly-Phe;
(SEQ ID NO: 1369)
Xaa2-Xaa3-Thr-Gly-Phe;
or
(SEQ ID NO: 1370)
Xaa3-Thr-Gly-Phe;

wherein Xaa1 is selected from a group consisting of: His, D-histidine, alpha, alpha-dimethyl imidiazole acetic acid (DMIA), N-methyl histidine, alpha-methyl histidine, imidazole acetic acid, desaminohistidine, hydroxyl-histidine, acetyl-histidine and homo-histidine; Xaa2 is selected from a group consisting of: Ser, D-serine, D-alanine, valine, glycine, N-methyl serine, N-methyl alanine, and aminoisobutyric acid (Aib); and Xaa3 is Gln or Glu.

[0801] The present invention also encompasses embodiments wherein the C-terminal amino acid of the Class 4 peptides have an amide group substituting for the carboxylic acid group that is present on the native amino acid.

[0802] In some embodiments, wherein the Class 4 peptide is PEGylated, the Class 4 peptide comprises the shortened glucagon peptides, specifically 6-29 where the “N-terminal” amino acid is PLA (phenyl-lactic acid). Such glucagon derivatives exhibit unique virtues. They are more potent peptides than those with the native N-terminal phenylalanine and they suppress any glucagon agonism that results from pegylation, something not seen with the native phenylalanine. Finally, while the current literature establishes that a substitution of the native aspartic acid at position 9 is required for antagonist activity, applicants have discovered the surprising result that such a substitution is no longer required in the PLA6-(6-29) glucagon analogs.

[0803] In some embodiments an amino acid of the Class 4 peptide is substituted with at least one cysteine residue, wherein the side chain of the cysteine residue is further modified with a thiol reactive reagent, including for example, maleimido, vinyl sulfone, 2-pyridylthio, haloalkyl, and haloacyl. These thiol reactive reagents may contain carboxy, keto, hydroxyl, and ether groups as well as other hydrophilic moieties such as polyethylene glycol units. In an alternative embodiment, an amino acid of the Class 4 peptide is substituted with lysine, and the side chain of the substituting lysine residue is further modified using amine reactive reagents such as active esters (succinimido, anhydride, etc) of carboxylic acids or aldehydes of hydrophilic moieties such as polyethylene glycol. In accordance with some embodiments the lysine residue corresponding to position 12 of the native peptide is substituted with arginine and a single lysine substitution is inserted for one of the amino acids corresponding to position 1, 16, 17, 20, 21, 24 or 29 of the native peptide, or a lysine is added to the N- or C-terminus of the Class 4 peptide.

[0804] In another embodiment the methionine residue corresponding to position 27 of the native peptide is changed to leucine or norleucine to prevent oxidative degradation of the peptide.

[0805] In some embodiments, the Class 4 peptides described herein are further modified by truncation or deletion of one or two amino acids of the C-terminus of the glucagon peptide (i.e., truncation of the amino acid at position 29 or at positions 28 and 29 of native glucagon) without affecting activity and/or potency at the glucagon receptor. In this regard, the Class 4 peptide described herein can, for example, consist essentially of or consist of amino acids 1-27, 1-28, 2-27, 2-28, 3-27, 3-28, 4-27, 4-28, 5-27, 5-28, 6-27, or 6-28 of the native glucagon peptide (SEQ ID NO: 1301) with one or more modifications resulting in Class 4 peptide activity as described herein.

[0806] The presently disclosed Class 4 peptides also encompass amino acid substitutions at positions that are known not to be critical to the function of the glucagon peptide. In some embodiments the substitutions are conservative amino acid substitutions at one, two or three positions selected from the group consisting of 2, 5, 6, 7, 8, 9, 12, 13, 14, 15, 16, 19, 22, 23 or 24 of SEQ ID NO: 1339. In some embodiments the Class 4 peptide comprises a derivative peptide of SEQ ID NO: 1342 wherein the glucagon peptide comprises a further amino acid substitution relative to SEQ ID NO: 1342 at one to three amino acid positions selected from positions 2, 5, 6, 8, 9, 12, 13 and 14. In some embodiments the substitutions at positions 2, 5, 6, 8, 9, 12, 13 and 14 of SEQ ID NO: 1342 are conservative amino acid substitutions. In some embodiments the amino acids corresponding to positions 16, 17, 20, 21, 24 or 29 of the native peptide, and more particularly at position 21 and/or 24 are substituted with cysteine or lysine, wherein a PEG chain is covalently attached to the substituted cysteine or lysine residue.

[0807] In accordance with some embodiments the modified Class 4 peptide comprises two or more polyethylene glycol chains covalently bound to the peptide wherein the total molecular weight of the glucagon chains is about 1,000 to about 5,000 Daltons. In some embodiments the pegylated Class 4 peptide comprises a peptide selected from the group consisting of SEQ ID NO: 1312, and SEQ ID NO: 1322, wherein said peptide comprise a polyethylene glycol chain linked to the amino acid at positions 11 and 19 and the combined molecular weight of the two PEG chains is about 1,000 to about 5,000 Daltons.

[0808] In accordance with some embodiments a Class 4 peptide is provided comprising a modified glucagon peptide selected from the group consisting of:

(SEQ ID NO: 1309)
R₁-Phe-Thr-Ser-Xaa-Tyr-Ser-Xaa-Tyr-Leu-Xaa-Xaa-Arg-Arg-Ala-Gln-Asp-Phe-Val-
Gln-Trp-Leu-Xaa-Asn-Thr-R₂,
(SEQ ID NO: 1310)
R₁-Phe-Thr-Ser-Xaa-Tyr-Ser-Xaa-Tyr-Leu-Asp-Ser-Arg-Arg-Ala-Gln-Xaa-Phe-Val-
Gln-Trp-Leu-Xaa-Asn-Thr-R₂,
(SEQ ID NO: 1311)
R₁-Phe-Thr-Ser-Xaa-Tyr-Ser-Xaa-Tyr-Leu-Asp-Ser-Arg-Arg-Ala-Gln-Asp-Phe-Val-
Xaa-Trp-Leu-Xaa-Asn-Thr-R₂
and
(SEQ ID NO: 1312)
R₁-Phe-Thr-Ser-Xaa-Tyr-Ser-Xaa-Tyr-Leu-Asp-Ser-Arg-Arg-Ala-Gln-Xaa-Phe-Val-
Xaa-Trp-Leu-Xaa-Asn-Thr-R₂,

wherein Xaa at position 4=aspartic acid, glutamic acid, cysteic acid or homocysteic acid, Xaa at position 7=Lys or Arg, Xaa at position 10 is aspartic acid, cysteic acid, glutamic acid, homoglutamic acid and homocysteic acid; Xaa at position 11 is Ser, Lys, Cys, Orn, homocysteine or acetyl phenylalanine, Xaa at position 16 is Asp, Lys, Cys, Orn, homocysteine or acetyl phenylalanine a and Xaa at position 19 is Gln, Lys, Cys, Orn, homocysteine and acetyl phenylalanine, Xaa at position 22=Met, Leu or Nle, R1 is OH or NH₂, and R₂ is COOH or CONH₂, wherein the peptide is pegylated at position 11 for SEQ ID NO: 1309, at position 16 for SEQ ID NO: 1310, position 19 for SEQ ID NO: 1311 and at positions 16 and 19 of SEQ ID NO: 1312, with the proviso that when Xaa at position 4=aspartic acid then R₁ is OH. In accordance with some embodiments the peptide comprises the sequence of SEQ ID NO: 1309, SEQ ID NO: 1310 or SEQ ID NO: 1311, wherein R₁ is OH and R₂ is CONH₂. In some embodiments the peptide comprises the sequence of SEQ ID NO: 1309, SEQ ID NO: 1310 or SEQ ID NO: 1311, wherein R₁ is OH, R₂ is CONH₂ and the amino acid at position 4 is aspartic acid, and in a further embodiment such peptides comprise a carboxy terminal extension comprising the sequence of SEQ ID NO: 1319.

[0809] In accordance with some embodiments the peptide comprises a sequence selected from the group consisting of SEQ ID NO: 1309, SEQ ID NO: 1310, SEQ ID NO: 1313, SEQ ID NO: 1314, and SEQ ID NO: 1316, wherein the peptide is pegylated at position 11 for SEQ ID NO: 1309 and SEQ ID NO: 1313, pegylated at position 16 for SEQ ID NO: 1310, and pegylated at position 19 for SEQ ID NO: 1310 and SEQ ID NO: 1314. In some embodiments the glucagon agonist comprises the peptide of SEQ ID NO: 1313 or SEQ ID NO: 1314. In some embodiments the C-terminal amino acid of the Class 4 peptides disclosed herein have an amide group in place of the carboxylic acid group that is present on the native amino acid. In accordance with some embodiments the Class 4 peptide comprises the sequence of SEQ ID NO: 1318.

[0810] In accordance with some embodiments, a Class 4 peptide is provided wherein a plasma protein has been covalently linked to an amino acid side chain of the peptide to improve the solubility, stability and/or pharmacokinetics of the glucagon peptide. For example, serum albumin can be covalently bound to the Class 4 peptides presented herein. In some embodiments the plasma protein is covalently bound to an amino acid corresponding to position 16, 17, 20, 21, 24 or 29 of the native glucagon peptide. More particularly, in some embodiments the plasma protein is bound to an amino acid corresponding to position 16 or 24 of the native glucagon peptide, wherein the Class 4 peptide comprises the sequence of SEQ ID NO: 1303, SEQ ID NO: 1304, SEQ ID NO: 1305, SEQ ID NO: 1306, SEQ ID NO: 1307, SEQ ID NO: 1308, SEQ ID NO: 1309, SEQ ID NO: 1311, SEQ ID NO: 1312, SEQ ID NO: 1322, SEQ ID NO: 1323, SEQ ID NO: 1324, SEQ ID NO: 1325, SEQ ID NO: 1326, SEQ ID NO: 1327, SEQ ID NO: 1328, SEQ ID NO: 1336 and SEQ ID NO: 1339. In some embodiments the Class 4 peptide comprises a peptide selected from the group consisting of SEQ ID NO: 1309, SEQ ID NO: 1310, SEQ ID NO: 1311 and SEQ ID NO: 1312.

[0811] In accordance with some embodiments, a Class 4 peptide is provided wherein a linear amino acid sequence representing the Fc portion of an immunoglobin molecule has been covalently linked to an amino acid side chain of a Class 4 peptide disclosed herein to improve the solubility, stability and/or pharmacokinetics of the glucagon peptide. For example, the amino acid sequence representing the Fc portion of an immunoglobin molecule can be covalently bound to position 11, 12, 15, 16, 19, 21 or 24 of the glucagon peptide of SEQ ID NO: 1307, SEQ ID NO: 1339, or a glucagon analog thereof. In some embodiments the Fc peptide is covalently bound to position 11 or 19 of the Class 4 peptide of SEQ ID NO: 1306, SEQ ID NO: 1307, SEQ ID NO: 1308 or SEQ ID NO: 1336. The Fc portion is usually isolated from IgG, but the Fc peptide fragment from any immunoglobin should function equivalently. In some embodiments the glucagon peptide is selected from the group consisting of SEQ ID NO: 1303, SEQ ID NO: 1304, SEQ ID NO: 1305, SEQ ID NO: 1307 SEQ ID NO: 1308, and SEQ ID NO: 1339, wherein the Fc portion is linked to the corresponding position of 16, 17, 20, 21, 24 or 29 of the native glucagon peptide. In some embodiments the Class 4 peptide comprises a glucagon peptide selected from the group consisting of SEQ ID NO: 1309, SEQ ID NO: 1310, SEQ ID NO: 1311 and SEQ ID NO: 1312, wherein the Fc peptide is bound to the side chain of the amino acid located at position 11, 16 or 19 of SEQ ID NO: 1309, SEQ ID NO: 1310, SEQ ID NO: 1311, respectively, and at both positions 11 and 19 for SEQ ID NO: 1312.

[0812] In certain embodiments of the invention, the Class 4 peptide comprises the amino acid sequence of any of SEQ ID NOs: 1362, 1364-1367, and 1371.

### Modifications to Improve Solubility

[0813] The Class 4 peptides can be further modified to improve the peptide's solubility in aqueous solutions at physiological pH, while, in some aspects retaining a glucagon antagonist activity. Introduction of hydrophilic groups at positions corresponding to positions 1, 16, 17, 20, 21, 24 and 29 of the native peptide, or at the C-terminus, can improve the solubility of the resulting Class 4 peptide in solutions having a physiological pH, while retaining the parent compounds antagonist activity. Therefore, in some embodiments the presently disclosed Class 4 peptides are further modified to comprise one or more hydrophilic groups covalently linked to the side chains of amino acids corresponding to amino acid positions 1, 16, 17, 20, 21, 24 and 29 of the native glucagon peptide or of the N- or C-terminal amino acid. In a further embodiment the side chains of amino acids corresponding to amino acid positions 16 and 24 of the native glucagon peptide are covalently bound to hydrophilic groups, and in some embodiments the hydrophilic group is polyethylene glycol (PEG).

[0814] Applicants have also discovered that native glucagon can be modified by introducing charge at its carboxy terminus to enhance the solubility of the peptide while retaining the agonist properties of the peptide. The enhanced solubility allows for the preparation and storage of glucagon solutions at near neutral pH. Formulating glucagon solutions at relatively neutral pHs (e.g. pH of about 6.0 to about 8.0) improves the long term stability of the Class 4 peptides.

[0815] Again, applicants anticipate that the Class 4 peptides disclosed herein can be similarly modified to enhance their solubility in aqueous solutions at relatively neutral pH (e.g. pH of about 6.0 to about 8.0) while retaining the antagonist properties of the parent protein. Accordingly, some embodiments of the present invention is directed to a Class 4 peptide of SEQ ID NO: 1339 that has been further modified relative to the native amino acids present at positions 6-29 of the wild type glucagon (SEQ ID NO: 1301) to add charge to the peptide by the substitution of native non-charged amino acids with charged amino acids, or the addition of charged amino acids to the carboxy terminus In accordance with some embodiments, one to three of the non-charged native amino acids of the Class 4 peptide of SEQ ID NO: 1339 are replaced with a charged amino acid. In some embodiments the charged amino acid is selected from the group consisting of lysine, arginine, histidine, aspartic acid and glutamic acid. More particularly, applicants have discovered that substituting the normally occurring amino acid at corresponding position 28 and/or 29 relative to native glucagon with charged amino acids, and/or the addition of one to two charged amino acids at the carboxy terminus of the Class 4 peptide, enhances the solubility and stability of the Class 4 peptides in aqueous solutions at physiologically relevant pHs (i.e., a pH of about 6.5 to about 7.5). Accordingly, such modifications of the Class 4 peptide disclosed herein are anticipated to have a similar effect on the solubility in aqueous solutions, particularly at a pH ranging from about 5.5 to about 8.0, while retaining the parent peptide's biological activity.

[0816] In accordance with some embodiments the Class 4 peptide of SEQ ID NO: 1339 is modified by the substitution of the native amino acid at corresponding position 28 and/or 29 relative to native glucagon with a negatively charged amino acid (e.g., aspartic acid or glutamic acid) and optionally the addition of a negatively charged amino acid (e.g., aspartic acid or glutamic acid) to the carboxy terminus of the peptide. In an alternative embodiment the Class 4 peptide of SEQ ID NO: 1339 is modified by the substitution of the native amino acid at corresponding position 29 relative to native glucagon with a positively charged amino acid (e.g., lysine, arginine or histidine) and optionally the addition of one or two positively charged amino acid (e.g., lysine, arginine or histidine) on the carboxy terminus of the peptide. In accordance with some embodiments a Class 4 peptide having improved solubility and stability is provided wherein the peptide comprises the amino acid sequence of SEQ ID NO: 1341 with the proviso that at least one amino acids at position, 23, or 24 of SEQ ID NO: 1341 is substituted with an acidic amino acid, and/or an additional acidic amino acid is added at the carboxy terminus of SEQ ID NO: 1341. In some embodiments the acidic amino acids are independently selected from the group consisting of Asp, Glu, cysteic acid and homocysteic acid.

[0817] In accordance with some embodiments a Class 4 peptide having improved solubility and stability is provided wherein the antagonist comprises the amino acid sequence of SEQ ID NO: 1341, SEQ ID NO: 1342, SEQ ID NO: 1343 or SEQ ID NO: 1344, wherein at least one of the amino acids at positions 23 or 24 is substituted with a non-native amino acid residue (i.e. at least one amino acid present at position 23 or 24 of the analog is an acidic amino acid different from the amino acid present at the corresponding position in SEQ ID NO: 1307). In accordance with some embodiments a glucagon agonist is provided comprising the sequence of SEQ ID NO: 1341 or 1342 with the proviso that when the amino acid at position 23 is asparagine and the amino acid at position 24 is threonine, the peptide further comprises one to two amino acids, independently selected from the group consisting of Lys, Arg, His, Asp or Glu, added to the carboxy terminus of the Class 4 peptide.

[0818] In another embodiment the solubility of the Class 4 peptide of SEQ ID NO: 1342 can be improved by covalently linking a hydrophilic moiety to an amino acid residue at position 11, 12, 15, 16, 19 or 24, and in some embodiments the hydrophilic moiety is linked to an amino acid at position 11, 16 or 19, and in a further embodiment the hydrophilic moiety is linked to amino acid 19. In some embodiments the hydrophilic moiety is a plasma protein or the Fc portion of an immunoglobin, and in an alternative embodiment the hydrophilic moiety is a hydrophilic hydrocarbon chain. In some embodiments the hydrophilic moiety is polyethylene glycol, having a molecular weight selected from the range of about 1,000 to about 5,000 Daltons. In another embodiment the hydrophilic moiety is polyethylene glycol, having a molecular weight of at least about 20,000 Daltons. In some embodiments the polyethylene modified Class 4 peptide comprises the amino acids sequence of SEQ ID NO: 1309, SEQ ID NO: 1310, SEQ ID NO: 1311, SEQ ID NO: 1312, SEQ ID NO: 1343, SEQ ID NO: 1344 or SEQ ID NO: 1345.

### Modifications to Improve Stability

[0819] The Asp-Ser sequence at position 15-16 of native glucagon has been identified as a uniquely unstable dipeptide that leads to premature chemical cleavage of the native hormone in aqueous buffers. For example, when maintained at 0.01N HCl at 37° C. for 2 weeks, more than 50% of the native glucagon may be cleaved into fragments. The two liberated cleavage peptides 1-15 and 16-29 are devoid of glucagon-like biological activity and thus represent a limitation on the aqueous pre-formulation of glucagon and its related analogs. The selective chemical substitution of the Asp at position 15 of the native glucagon peptide with Glu has been observed to virtually eliminate chemical cleavage of the 15-16 peptide bond.

[0820] Accordingly, it is expected that the Class 4 peptides of the present invention can be similarly modified to decrease their susceptibility to premature chemical cleavage in aqueous buffers. In accordance with some embodiments the Class 4 peptides described herein can be further modified to enhance their stability in aqueous solutions by replacing the native aspartic amino acid, located at position 15 of the native glucagon peptide, with an amino acid selected from the group consisting of cysteic acid, glutamic acid, homoglutamic acid and homocysteic acid. In accordance with some embodiments the aspartic acid residue at position 10 of the Class 4 peptide of SEQ ID NO: 1339 can be substituted with an amino acid selected from the group consisting of cysteic acid, glutamic acid, homoglutamic acid and homocysteic acid, and in some embodiments the native aspartic acid at position 10 of SEQ ID NO: 1339 is replaced with glutamic acid. In accordance with some embodiments a Class 4 peptide having improved stability in aqueous solutions is provided wherein the antagonist comprises a sequence selected from the group consisting of SEQ ID NO: 1336, SEQ ID NO: 1340 and SEQ ID NO: 1342. In a further embodiment the Class 4 peptide is amidated.

[0821] In accordance with some embodiments, increased stability by way of reduced degradation of the Class 4 peptide described herein may also be achieved by substitution of the serine at position 16 (according to the numbering of native glucagon) with glutamic acid, cysteic acid, homo-glutamic acid, or homo-cysteic acid. In a specific embodiment, the serine at position 16 (according to the native glucagon sequence numbering) is replaced with glutamic acid. In a more specific aspect, the Class 4 peptide comprising such a modification comprises a C-terminal carboxylate and is not amidated.

[0822] In accordance with some embodiments, a Class 4 peptide is provided comprising a glucagon peptide selected from the group consisting of SEQ ID NO: 1307, SEQ ID NO: 1336, SEQ ID NO: 1339, SEQ ID NO: 1340, SEQ ID NO: 1341, SEQ ID NO: 1342, SEQ ID NO: 1343 and SEQ ID NO: 1344, further modified by one or more additional amino acid substitutions at positions corresponding to positions 11, 12, 15, 16, 19 and/or 24 of the native glucagon peptide, wherein the amino acid substitutions comprise a substitution with an amino acid having a side chain suitable for crosslinking with hydrophilic moieties, including for example, PEG. The peptide can be substituted with a naturally occurring amino acid or a synthetic (non-naturally occurring) amino acid. Synthetic or non-naturally occurring amino acids refer to amino acids that do not naturally occur in vivo but which, nevertheless, can be incorporated into the peptide structures described herein. In some embodiments a Class 4 peptide is provided wherein the peptide comprises the sequence of SEQ ID NO: 1307, SEQ ID NO: 1336, SEQ ID NO: 1339, SEQ ID NO: 1340, SEQ ID NO: 1341, SEQ ID NO: 1342, SEQ ID NO: 1343 and SEQ ID NO: 1344, and further comprises a polyethylene glycol chain bound to corresponding position 21 or 24 of the native glucagon peptide. In a further embodiment the C-terminus of the Class 4 peptide is modified to replace the carboxylic acid group with an amide group.

### Fusion Peptides and Conjugates

[0823] The present disclosure also encompasses Class 4 peptide fusion peptides wherein a second peptide has been fused to the C-terminus of the Class 4 peptide. More particularly, the fusion peptide may comprise a Class 4 peptide peptide of SEQ ID NO: 1344 that further comprises an amino acid sequence of SEQ ID NO: 1319 (GPSSGAPPPS), SEQ ID NO: 1320 (Lys Arg Asn Arg Asn Asn Ile Ala) or SEQ ID NO: 1321 (Lys Arg Asn Arg) linked to the c-terminal amino acid of the Class 4 peptide. In some embodiments the amino acid sequence of SEQ ID NO: 1319 (GPSSGAPPPS) is bound to amino acid 24 of the Class 4 peptide of SEQ ID NO: 1342 through a peptide bond. In another embodiment the fusion peptide comprises a Class 4 peptide peptide of SEQ ID NO: 1307, SEQ ID NO: 1336, SEQ ID NO: 1339, SEQ ID NO: 1340, SEQ ID NO: 1341 or SEQ ID NO: 1343 that further comprises an amino acid sequence of SEQ ID NO: 1319 (GPSSGAPPPS) linked to amino acid 24 of the Class 4 peptide. In another embodiment the fusion peptide comprises a Class 4 peptide peptide of SEQ ID NO: 1307, SEQ ID NO: 1336, SEQ ID NO: 1337, SEQ ID NO: 1338, SEQ ID NO: 1339, SEQ ID NO: 1341 or SEQ ID NO: 1343 that further comprises an amino acid sequence of SEQ ID NO: 1320, SEQ ID NO: 1321 or SEQ ID NO: 1353 linked to amino acid 24 of the Class 4 peptide. In some embodiments the Class 4 peptide fusion peptide comprises a sequence selected from the group consisting of SEQ ID NO: 1346 and SEQ ID NO 1347. In a further embodiment the C-terminus of the fusion peptide is modified to replace the carboxylic acid group with an amide group.

[0824] In some embodiments a Class 4 peptide fusion peptide is provided wherein the Class 4 peptide portion of the fusion peptide is selected from the group consisting of SEQ ID NO: 1303, SEQ ID NO: 1304, SEQ ID NO: 1305, SEQ ID NO: 1306, SEQ ID NO: 1307, SEQ ID NO: 1308, SEQ ID NO: 1309, SEQ ID NO: 1311, SEQ ID NO: 1312, SEQ ID NO: 1313, SEQ ID NO: 1314, SEQ ID NO: 1315, SEQ ID NO: 1310, SEQ ID NO: 1316, SEQ ID NO: 1317, SEQ ID NO: 1318 and SEQ ID NO: 1339 and the sequence of SEQ ID NO: 1319 is fused to the carboxy terminus of the Class 4 peptide portion, and wherein the PEG chain, when present, is selected from the range of 500 to 40,000 Daltons. More particularly, in some embodiments the Class 4 peptide segment is selected from the group consisting of SEQ ID NO: 1313, SEQ ID NO: 1314, SEQ ID NO: 1315, SEQ ID NO: 1316, SEQ ID NO: 1346 and SEQ ID NO: 1347 wherein the PEG chain is selected from the range of about 500 to about 5,000 Daltons, and more particularly, in some embodiments the PEG chain is about 1,000 Daltons. In a further embodiment the C-terminus is modified to replace the carboxylic acid group with an amide group.

[0825] The Class 4 peptide may further comprise one to two charged amino acids added to the carboxy terminus. In some embodiments, wherein one to two charged amino acids are added to the carboxy terminus of SEQ ID NO: 1344, the amino acids are negatively charged amino acids, including for example glutamic acid and aspartic acid. In some embodiments, the Class 4 peptide comprises the sequence of SEQ ID NO: 1342 wherein at least one of corresponding positions 27 and 28 relative to the native glucagon peptide comprises an amino acid selected from the group consisting of aspartic acid and glutamic acid and wherein SEQ ID NO: 1342 is optionally modified to include an addition one to two negatively charged amino acids added to the carboxy terminus. In some embodiments the negatively charged amino acids are glutamic acid or aspartic acid.

[0826] The Class 4 peptides disclosed herein can be combined with other active agents, including for example, insulin, to treat diseases or conditions that are characterized by excessive glucagon activity. In some embodiments, Class 4 peptides that have been modified to be covalently bound to a PEG chain having a molecular weight of greater than 10,000 Daltons can be administered in conjunction with insulin to help to maintain stable blood glucose levels in diabetics. The Class 4 peptides of the present disclosure can be co-administered with insulin as a single composition, simultaneously administered as separate solutions, or alternatively, the insulin and the Class 4 peptide can be administered at different times relative to one another. In some embodiments the composition comprising insulin and the composition comprising the Class 4 peptide are administered within 12 hours of one another. The exact ratio of the Class 4 peptide relative to the administered insulin will be dependent in part on determining the glucagon levels of the patient, and can be determined through routine experimentation.

### Dimer Peptides

[0827] The present disclosure also encompasses multimers of the modified Class 4 peptides disclosed herein. Two or more of the modified Class 4 peptides can be linked together using standard linking agents and procedures known to those skilled in the art. For example, dimers can be formed between two modified Class 4 peptides through the use of bifunctional thiol crosslinkers and bi-functional amine crosslinkers, particularly for Class 4 peptides that have been substituted (at positions 11, 16 or 19, for example) with cysteine, lysine ornithine, homocysteine or acetyl phenylalanine residues (e.g. SEQ ID NO: 1309, SEQ ID NO: 1310, SEQ ID NO: 1311 and SEQ ID NO: 1312). The dimer can be a homodimer or alternatively can be a heterodimer. In some embodiments the dimer is formed between two Class 4 peptides independently selected from the group consisting of SEQ ID NO: 1308, SEQ ID NO: 1309, SEQ ID NO: 1310, SEQ ID NO: 1311, SEQ ID NO: 1312, SEQ ID NO: 1345, SEQ ID NO: 1346, or SEQ ID NO: 1347, wherein the two peptides are linked to one another via a linker attached to position 11 of each peptide, 16 of each peptide, or position 19 of each peptide or any combination thereof. In some embodiments the linkage is a disulfide linkage between a Cys11 to Cys11 or a Cys 19 to Cys 19 or a Cys11 to Cys 19 residue of the respective Class 4 peptide peptides.

[0828] Similarly, a dimer can be formed between two Class 4 peptide peptides independently selected form the group consisting of SEQ ID NO: 1303, SEQ ID NO: 1304, SEQ ID NO: 1305, SEQ ID NO: 1306, SEQ ID NO: 1307, SEQ ID NO: 1308, SEQ ID NO: 1309, SEQ ID NO: 1310, SEQ ID NO: 1311, SEQ ID NO: 1312, SEQ ID NO: 1336, SEQ ID NO: 1337, SEQ ID NO: 1338, SEQ ID NO: 1339 and SEQ ID NO: 1342 wherein the linkage is formed between amino acid positions independently selected from positions 16, 21 and 24 with respect to the native glucagon peptide.

[0829] In accordance with some embodiments a Class 4 peptide dimer is provided comprising two Class 4 peptides, each comprising the sequence of SEQ ID NO: 1346, wherein the two antagonists are linked to one another by a disulfide bond through amino acid position 25. In another embodiment a Class 4 peptide dimer is provided comprising two Class 4 peptides, each comprising the sequence of SEQ ID NO: 1347, wherein the two antagonists are linked to one another by a disulfide bond through amino acid position 35. In some embodiments the dimer is formed from Class 4 peptides of SEQ ID NO: 1346 and SEQ ID NO: 1347 wherein the amino acid at position 10 is glutamic acid.

[0830] In some embodiments the dimer comprises a homodimer of a Class 4 peptide fusion peptide selected from the group consisting of SEQ ID NO: 1307, SEQ ID NO: 1308, SEQ ID NO: 1336, SEQ ID NO: 1337, SEQ ID NO: 1340, SEQ ID NO: 1339, NO: 1340, SEQ ID NO: 1341, SEQ ID NO: 1342 and pharmaceutically acceptable salts of said Class 4 peptides. In accordance with some embodiments a dimer is provided comprising a first Class 4 peptide bound to a second Class 4 peptide via a linker, wherein the first and second peptides of the dimer are independently selected from the group consisting of SEQ ID NO: 1307, SEQ ID NO: 1308, SEQ ID NO: 1336, SEQ ID NO: 1337, SEQ ID NO: 1339, SEQ ID NO: 1340, SEQ ID NO: 1341, and SEQ ID NO: 1342, and pharmaceutically acceptable salts of said glucagon polypeptides. In another embodiment the first and second Class 4 peptides of the dimer are independently selected from the group consisting of SEQ ID NO: 1307, SEQ ID NO: 1308, SEQ ID NO: 1336 and SEQ ID NO: 1339.

[0831] In another embodiment the dimer comprises a homodimer of a Class 4 peptide selected from the group consisting of SEQ ID NO: 1323, SEQ ID NO: 1324, SEQ ID NO: 1325, SEQ ID NO: 1326, SEQ ID NO: 1327, SEQ ID NO: 1328, SEQ ID NO: 1329, SEQ ID NO: 1330, SEQ ID NO: 1331. In another embodiment, a Class 4 peptide dimer is provided wherein the first and second peptides of the dimer comprise an amino acid sequence independently selected from the group consisting of SEQ ID NO: 1323, SEQ ID NO: 1324, SEQ ID NO: 1325, SEQ ID NO: 1326, SEQ ID NO: 1327 and SEQ ID NO: 1328. In another embodiment the dimer comprises a homodimer of a Class 4 peptide selected from the group consisting of SEQ ID NO: 1309, SEQ ID NO: 1311 and SEQ ID NO: 1312, wherein the peptide further comprises a polyethylene glycol chain covalently bound to position 11 or 19 of the glucagon peptide.

[0832] The Class 4 glucagon related peptide may comprise the amino acid sequence of any of SEQ ID NOs: 1301-1371, optionally with up to 1, 2, 3, 4, or 5 further modifications that retain glucagon antagonist activity.

### Class 5 Glucagon Related Peptides

[0833] In certain embodiments, a glucagon related peptide is a class 5 glucagon related peptide (see, e.g., International (PCT) Patent Application Publication No. WO 2009/058734, incorporated herein by reference in its entirety).

[0834] All biological sequences referenced in the following section (SEQ ID NOs: 1401-1518) correspond to SEQ ID NOs.: 1-118 in International Patent Application Publication No. WO 2009/058734.

### Activity

[0835] In certain aspects a class 5 glucagon related peptide (hereafter referred to as a “class 5 peptide”) may be a glucagon antagonist/GLP-1 agonist. Glucagon antagonists/GLP-1 agonists are utilized in any setting where the suppression of glucagon agonism is desired while simultaneous stimulation of GLP-1 activity is also desired. For example, glucagon antagonist activity in conjunction with GLP-1 stimulation can be used in the treatment of diabetes where glucagon antagonism has been demonstrated in pre-clinical models of hyperglycemia to yield a lowering of blood glucose and GLP-1 activity is associated with insulin production. Compounds demonstrating GLP-1 activity have also been known to be useful for treating obesity and preventing weight gain.

[0836] In certain aspects class 5 peptides are believed to be suitable for any use that has previously been described for other glucagon antagonist/GLP-1 agonists. These two activities have separately been shown to be highly desirable properties for the treatment of the metabolic syndrome, specifically diabetes and obesity. The glucagon antagonist activity is useful in any setting where the suppression of glucagon agonism is desired. The presence of GLP-1 agonism further suppresses the endogenous secretion of glucagon from the pancreas while stimulating insulin synthesis and secretion. The two pharmacological actions serve in a synergistic fashion to normalize metabolic abnormalities. Accordingly, the Class 5 peptides can be used to treat hyperglycemia, or treat other metabolic diseases that result from high blood levels of glucagon or high blood glucose levels. In accordance with some embodiments the patient to be treated using the glucagon antagonist/GLP-1 agonists such as class 5 peptides disclosed herein is a domesticated animal, and in another embodiment the patient to be treated is a human. Studies suggest that lack of glucagon suppression in diabetic patients contributes to postprandial hyperglycemia in part via accelerated glycogenolysis. Analysis of blood glucose during an Oral Glucose Tolerance Test (OGTT), and in the presence or absence of somatostatin-induced glucagon suppression has shown a significant increase in glucose in subjects with higher glucagon levels. Accordingly, a glucagon antagonist/GLP-1 agonists or Class 5 peptides described herein can be used to treating hyperglycemia, and are expected to be useful for treating a variety of types of diabetes including diabetes mellitus type I, diabetes mellitus type II, or gestational diabetes, either insulin-dependent or non-insulin-dependent, and reducing complications of diabetes including nephropathy, retinopathy and vascular disease.

[0837] Such methods for reducing appetite or promoting loss of body weight are expected to be useful in reducing body weight, preventing weight gain, or treating obesity of various causes, including drug-induced obesity, and reducing complications associated with obesity including vascular disease (coronary artery disease, stroke, peripheral vascular disease, ischemia reperfusion, etc.), hypertension, onset of diabetes type II, hyperlipidemia and musculoskeletal diseases.

[0838] Pharmaceutical compositions comprising class 5 peptides can be formulated and administered to patients using standard pharmaeuctically acceptable carriers and routes of administration known to those skilled in the art. Accordingly, the present disclosure also encompasses pharmaceutical compositions comprising one or more class 5 peptides disclosed herein in combination with a pharmaceutically acceptable carrier. The pharmaceutical compositions may comprise the class 5 peptides as the sole pharmaceutically active component, or the class 5 peptides can be combined with one or more additional active agents. In accordance with some embodiments a composition is provided comprising a Class 5 peptide and insulin or an insulin analog. Alternatively, a composition is provided for inducing weight loss or preventing weight gain can be provided that comprises the sequence of SEQ ID NO: 1415 or SEQ ID NO: 1451 further comprising the amino acid sequence of SEQ ID NO: 1421 (GPSSGAPPPS) or SEQ ID NO: 1450 linked to amino acid 24 of SEQ ID NO: 1415 or SEQ ID NO: 1451, and an anti-obesity peptide. Suitable anti-obesity peptides include those disclosed in U.S. Pat. Nos. 5,691,309, 6,436,435 or US Patent application 20050176643.

### Class 5 Peptide Structure

[0839] In accordance with some embodiments a Class 5 peptide is provided comprising a glucagon peptide that has been modified by the deletion of the first 1 to 5 amino acids residues (e.g., first amino acid, first two amino acids, first three amino acids, first four amino acids, first five amino acids) from the N-terminus, and stabilization of the alpha-helix structure in the C-terminal portion of the compound (around amino acid positions 12-29 according to the amino acid numbering of wild type glucagon, SEQ ID NO: 1401), e.g., by the linkage of the side chains of amino acid pairs, selected from positions 12 and 16, 16 and 20, 20 and 24, and 24 and 28 (relative to the native glucagon peptide sequence), to one another through hydrogen-bonding or ionic interactions, such as the formation of salt bridges, or by covalent bonds. Alternatively, stabilization of the alpha-helix around residues 12-29 is achieved through introduction of one or more α,α-disubstituted amino acids at positions that retain the desired activity. In some embodiments, one, two, three, four or more of positions 16, 17, 18, 19, 20, 21, 24 or 29 (according to the amino acid numbering of wild type glucagon) of the Class 5 peptide or analog thereof is substituted with an α,α-disubstituted amino acid. For example, substitution of position 16 (according to the amino acid numbering of wild type glucagon) of a Class 5 peptide or analog thereof with amino iso-butyric acid (Aib) provides a stabilized alpha helix in the absence of a salt bridge or lactam. In some embodiments, one, two, three or more of positions 16, 20, 21 or 24 (according to the amino acid numbering of wild type glucagon) are substituted with Aib.

[0840] In accordance with some embodiments, a class 5 peptide is provided wherein the peptide exhibits at least 80% of the maximum agonism achieved by native GLP-1 at the GLP-1 receptor, and exhibits glucagon antagonist activity that reduces the maximum glucagon-induced cAMP production at the glucagon receptor by at least about 50%, as measured by cAMP production in an in vitro assay. In some embodiments, the class 5 peptide exhibits at least 90% of the activity of native GLP-1 at the GLP-1 receptor, and exhibits glucagon antagonist activity, that reduces the maximum glucagon-induced cAMP production at the glucagon receptor by at least about 80%.

[0841] In accordance with some embodiments the class 5 peptide comprises a derivative peptide of SEQ ID NO: 1402 wherein the peptide comprises further amino acid substitutions relative to SEQ ID NO: 1402 at one to three amino acid positions selected from positions 1, 2, 4, 5, 6, 7, 8, 9, 10, 11, 12, 13, 14, 15, 16, 19, 22 and 24, and exhibits at least 90% of the activity of native GLP-1 at the GLP-1 receptor, and exhibits glucagon antagonist activity, that reduces the maximum glucagon-induced cAMP production at the glucagon receptor by at least about 80%.

[0842] In some embodiments, the alpha-helix structure in the C-terminal portion of the Class peptide (around amino acids 12-29 according to the amino acid numbering of wild type glucagon) is stabilized by, e.g., formation of a covalent or non-covalent intramolecular bridge, or substitution and/or insertion of amino acids around positions 12-29 with an alpha helix-stabilizing amino acid (e.g., an α,α-disubstituted amino acid). In some embodiments, one, two, three, four or more of positions 16, 17, 18, 19, 20, 21, 24 or 29 (according to the amino acid numbering of wild type glucagon) of the Class 5 peptide or analog thereof is substituted with an α,α-disubstituted amino acid e.g., amino isobutyric acid (Aib). For example, substitution of position 16 (according to the amino acid numbering of wild type glucagon) of a Class 5 peptide or analog thereof with amino iso-butyric acid (Aib) provides a stabilized alpha helix in the absence of a salt bridge or lactam.

[0843] In some embodiments the class 5 peptide comprises SEQ ID NO: 1415 or SEQ ID NO: 1451, and more particularly, a sequence selected from the group consisting of SEQ ID NO: 1405, SEQ ID NO: 1406, SEQ ID NO: 1407, SEQ ID NO: 1408, SEQ ID NO: 1409, SEQ ID NO: 1416, SEQ ID NO: 1417, SEQ ID NO: 1418, SEQ ID NO: 1419, SEQ ID NO: 1422, SEQ ID NO: 1423, SEQ ID NO: 1424 and SEQ ID NO: 1425. In further embodiments the class 5 peptide comprises a derivative peptide of SEQ ID NO: 1415 or SEQ ID NO: 1451 wherein the peptide comprises a further amino acid substitution relative to SEQ ID NO: 1415 or SEQ ID NO: 1451 at one to three amino acid positions selected from positions 1, 2, 5, 6, 8, 9, 12, 13 and 14. In some embodiments the substitutions at positions 1, 2, 5, 6, 8, 9, 12, 13 and 14 are conservative amino acid substitutions. In some embodiments the threonine at position 24 of SEQ ID NO: 1405 or SEQ ID NO: 1406 is substituted with glycine.

[0844] In accordance with some embodiments the class 5 peptide represents a further modification of the peptide wherein in addition to the N-terminal deletion, the phenylalanine at position 6 of the native glucagon peptide is modified, e.g., to comprise a hydroxyl group in place of the N-terminus amino group. In a further embodiment the natural carboxylic acid of the C-terminal amino acid is replaced with a charge-neutral group, such as an amide or ester.

[0845] In accordance with some embodiments, Class 5 peptides have been prepared wherein the first three to five amino acids of native glucagon have been deleted, the amino acid at position 9, relative to the native glucagon peptide, has been substituted with an amino acid selected from the group consisting of glutamic acid, homoglutamic acid, β-homoglutamic acid, a sulfonic acid derivative of cysteine, or an alkylcarboxylate derivative of cysteine having the structure of:

[chemical structure]

wherein X₅ is C1-C4 alkyl, C2-C4 alkenyl, or C2-C4 alkynyl, and the alpha-helix structure in the C-terminal portion of glucagon (around amino acids 12-29 according to the amino acid numbering of wild type glucagon) is stabilized, e.g., via a lactam bridge is formed between the side chains of amino acids 12 and 16 or between amino acids 16 and 20, relative to the native glucagon peptide. Examples of amino acid pairings that are capable of covalently bonding to form a seven-atom linking bridge are detailed through-out this disclosure. In some embodiments, the sulfonic acid derivative of cysteine is cysteic acid or homocysteic acid.

[0846] In some embodiments a class 5 is provided comprising an amino acid sequence selected from the group consisting of SEQ ID NO: 1405, SEQ ID NO: 1406, SEQ ID NO: 1407, or SEQ ID NO: 1408, wherein said peptide comprises a lactam ring formed between the side chains of amino acids 7 and 11 for SEQ ID NO: 1405, between 11 and 15 for SEQ ID NO: 1406, between positions 15 and 19 for SEQ ID NO: 1407 and between positions 19 and 24 for SEQ ID NO: 1408, each of said sequences being further modified to comprise a hydrophilic moiety covalently bound to the peptide. More particularly, in some embodiments each of the lactam bearing class 5 peptide are modified by covalent attachment of a polyethylene glycol chain. For example, for a class 5 peptide comprising SEQ ID NO: 1405, the peptide is pegylated at a position selected from the group consisting of 12, 15, 16, 19 and 24; for a class 5 peptide comprising SEQ ID NO: 1406, the peptide is pegylated at a position selected from the group consisting of 12, 16, 19 and 24; for a class 5 peptide comprising SEQ ID NO: 1407, the peptide is pegylated at a position selected from the group consisting of 11, 12, 16 and 24; for class 5 peptide comprising SEQ ID NO: 1408, the peptide is pegylated at a position selected from the group consisting of 11, 12, 15 and 16. In accordance with some embodiments a class 5 peptide comprising SEQ ID NO: 1447 or SEQ ID NO: 1448 is provided wherein the peptide is pegylated at a position selected from the group consisting of 12, 16, 19 and 24, relative to the SEQ ID NO: 1447 or SEQ ID NO: 1448 sequence. In a further embodiment the peptide of SEQ ID NO: 1447 or SEQ ID NO: 1448 is further modified by the addition of the sequence of SEQ ID NO: 1421 to the carboxy terminus of the peptide.

[0847] As detailed above in certain aspects Class 5 peptides are provided wherein the first five amino acids of native glucagon have been deleted, the amino group of the N-terminal amino acid (phenylalanine) has been replaced with a hydroxyl group (i.e., the first amino acid is phenyl-lactic acid) and the side chains of one or more amino acid pairs selected from positions 12 and 16, 16 and 20, 20 and 24, and 24 and 28 are linked to one another, thus stabilizing the Class 5 peptide alpha helix.

[0848] In accordance with some embodiments a class 5 peptide is provided comprising the sequence of SEQ ID NO: 1402 that is modified by a substitution of the serine residue at position 11 of SEQ ID NO: 1402 (position 16 according to the amino acid numbering of native glucagon) with an amino acid selected from the group consisting of glutamic acid, glutamine, homoglutamic acid, homocysteic acid, threonine or glycine. In accordance with some embodiments the serine residue at position 11 of SEQ ID NO: 1402 is substituted with an amino acid selected from the group consisting of glutamic acid, glutamine, homoglutamic acid and homocysteic acid, and in some embodiments the serine residue is substituted with glutamic acid. In accordance with some embodiments the class 5 peptide comprises the sequence of SEQ ID NO: 1438.

[0849] In some embodiments a class 5 peptide is provided wherein an intramolecular bridge is formed between two amino acid side chains to stabilize the three dimensional structure of the carboxy terminus of the peptide of SEQ ID NO: 1402. More particularly, the side chains of one or more amino acids selected from amino acid pairs 7 and 11, 11 and 15, 15 and 19 or 19 and 23 of SEQ ID NO: 1402 are linked to one another, thus stabilizing the alpha helix in the C-terminal portion. The two side chains can be linked to one another through hydrogen-bonding, ionic interactions (such as the formation of salt bridges), or by covalent bonds. In accordance with some embodiments the size of the linker is 7-9 atoms, and in some embodiments the size of the linker is 8 atoms. In some embodiments the class 5 peptide is selected from the group consisting of SEQ ID NO: 1405, SEQ ID NO: 1406, SEQ ID NO: 1407 and SEQ ID NO: 1408. In some embodiments the C-terminal amino acid of the class 5 peptide have an amide group substituting for the carboxylic acid group that is present on the native amino acid.

[0850] In accordance with some embodiments class 5 peptide is provided wherein the analog comprises an amino acid sequence of SEQ ID NO: 1409. In some embodiments the three dimensional structure of the carboxy terminus of the peptide of SEQ ID NO: 1409 is stabilized by the formation of covalent bonds between the side chains of the peptide. In some embodiments two amino acid side chains are bound to one another to form a lactam ring. The size of the lactam ring can vary depending on the length of the amino acid side chains, and in some embodiments the lactam is formed by linking the side chains of a lysine amino acid to a glutamic acid side chain. In some embodiments the C-terminal amino acid of the class 5 peptides have an amide group substituting for the carboxylic acid group that is present on the native amino acid.

[0851] The order of the amide bond in the lactam ring can be reversed (e.g., a lactam ring can be formed between the side chains of a Lys 12 and a Glu 16 or alternatively between a Glu 12 and a Lys16). In accordance with some embodiments a glucagon analog of SEQ ID NO: 1409 is provided wherein at least one lactam ring is formed between the side chains of an amino acid pair selected from the group consisting of amino acid pairs 7 and 11, 11 and 15, 15 and 19 or 19 and 23 of SEQ ID NO: 1409. In some embodiments a class 5 peptide is provided wherein the peptide comprises the sequence of SEQ ID NO: 1410, said sequence further comprising an intramolecular lactam bridge formed between amino acid positions 7 and 11, or between amino acid positions 11 and 15, or between amino acid positions 15 and 19 of SEQ ID NO: 1410. In some embodiments a class 5 peptide is provided wherein the peptide comprises the sequence of SEQ ID NO: 1411, said sequence further comprising an intramolecular lactam bridge formed between amino acid positions 7 and 11, or between amino acid positions 11 and 15 of SEQ ID NO: 1411. In some embodiments the class 5 peptide comprises the sequence of SEQ ID NO: 1417.

[0852] Additional class 5 peptide are provided comprising derivatives of SEQ ID NO: 1405, wherein the aspartic acid at position 10 of SEQ ID NO: 1405 (position 15 of native glucagon) has been substituted with glutamic acid, an amino acid of the general structure:

[chemical structure]

wherein X₆ is C1-C3 alkyl, C2-C3 alkene or C2-C3 alkynyl, and in some embodiments X₆ is C1-C3 alkyl, and in another embodiment X₆ is C2 alkyl. In some embodiments a Class 5 peptide derivative of SEQ ID NO: 1409 is provided wherein position 10 of SEQ ID NO: 1409 (position 15 of native glucagon) is substituted with an amino acid selected from the group consisting of glutamic acid, cysteic acid, homocysteic acid and homoglutamic acid. In a further embodiment position 10 of SEQ ID NO: 1409 is substituted with an amino acid selected from the group consisting of cysteic acid or homocysteic acid. In some embodiments a Class 5 peptide derivative of SEQ ID NO: 1406, SEQ ID NO: 1407 or SEQ ID NO: 1408 is provided wherein position 10 of SEQ ID NO: 1406, SEQ ID NO: 1407 or SEQ ID NO: 1408 is substituted with an amino acid selected from the group consisting of glutamic acid, cysteic acid, homocysteic acid and homoglutamic acid. In some embodiments the C-terminal amino acid of a class 5 peptide have an amide group substituting for the carboxylic acid group that is present on the native amino acid.

[0853] In some embodiments an amino acid of class 5 peptide is substituted with at least one cysteine residue, wherein the side chain of the cysteine residue is further modified with a thiol reactive reagent, including for example, maleimido, vinyl sulfone, 2-pyridylthio, haloalkyl, and haloacyl. These thiol reactive reagents may contain carboxy, keto, hydroxyl, and ether groups as well as other hydrophilic moieties such as polyethylene glycol units. In an alternative embodiment, an amino acid of a class 5 peptide is substituted with lysine, and the side chain of the substituting lysine residue is further modified using amine reactive reagents such as active esters (succinimido, anhydride, etc) of carboxylic acids or aldehydes of hydrophilic moieties such as polyethylene glycol. In accordance with some embodiments the lysine residue corresponding to position 7 of the peptide of SEQ ID NO: 1405 is substituted with arginine and a single lysine substitution is inserted for one of the amino acids corresponding to position 12, 15, 16, 19 and 24 of SEQ ID NO: 1405.

[0854] In another embodiment the methionine residue corresponding to position 22 of the class 5 peptides disclosed herein is changed to leucine or norleucine to prevent oxidative degradation of the peptide.

[0855] Moreover class 5 peptides, in some aspects, also encompass amino acid substitutions at positions that are known not to be critical to the function of the glucagon analog. In some embodiments the substitutions are conservative amino acid substitutions at one, two or three positions selected from the group consisting of 2, 5, 6, 7, 8, 9, 12, 13, 14, 15, 16, 19, 22, 23 or 24. In some embodiments the amino acids corresponding to positions 16, 17, 20, 21, 24 or 29 of the native glucagon peptide, and more particularly at position 21 and/or 24 relative to native glucagon are substituted with cysteine or lysine, wherein a PEG chain is covalently attached to the substituted cysteine or lysine residue.

[0856] In accordance with some embodiments, a class 5 peptide is provided comprising a sequence consisting of SEQ ID NO: 1409, further modified by one or more additional amino acid substitutions at positions corresponding to positions 11, 12, 15, 16, 19 and/or 24 of the peptide (including for example substitution with cysteine), wherein the amino acid substitution comprises an amino acid having a side chain suitable for crosslinking with hydrophilic moieties, including for example, PEG. Native glucagon can be substituted with a naturally occurring amino acid or a synthetic (non-naturally occurring) amino acid. Synthetic or non-naturally occurring amino acids refer to amino acids that do not naturally occur in vivo but which, nevertheless, can be incorporated into the peptide structures described herein. In some embodiments a Class 5 peptide is provided wherein the peptide comprises the sequence of SEQ ID NO: 1409 and further comprises a polyethylene glycol chain bound to position 16 or 19 of the peptide. In a further embodiment the C-terminus of the glucagon analog is modified to replace the carboxylic acid group with an amide group.

[0857] In accordance with some embodiments a class 5 peptide is provided comprising a glucagon analog selected from the group consisting of:

(SEQ ID NO: 1439)
R₁-Phe-Thr-Ser-Xaa-Tyr-Ser-Lys-Tyr-Leu-Xaa-Glu-Arg-Arg-Ala-Gln-Asp-Phe-Val-
Gln-Trp-Leu-Xaa-Asn-Thr-R₂
(SEQ ID NO: 1413)
R₁-Phe-Thr-Ser-Xaa-Tyr-Ser-Lys-Tyr-Leu-Asp-Glu-Arg-Arg-Ala-Gln-Xaa-Phe-Val-
Gln-Trp-Leu-Xaa-Asn-Thr-R₂,
(SEQ ID NO: 1414)
R₁-Phe-Thr-Ser-Xaa-Tyr-Ser-Lys-Tyr-Leu-Asp-Glu-Arg-Arg-Ala-Gln-Asp-Phe-Val-
Xaa-Trp-Leu-Xaa-Asn-Thr-R₂
and
(SEQ ID NO: 1412)
R₁-Phe-Thr-Ser-Xaa-Tyr-Ser-Lys-Tyr-Leu-Asp-Glu-Arg-Arg-Ala-Gln-Xaa-Phe-Val-
Xaa-Trp-Leu-Xaa-Asn-Thr-R₂,

wherein Xaa at position 4=aspartic acid, glutamic acid, cysteic acid or homocysteic acid, Xaa at position 10=Asp, Glu, cysteic acid, homoglutamic acid and homocysteic acid, Xaa at position 16 is Asp, Cys, Orn, homocysteine or acetyl phenylalanine and the Xaa at position 19 is Gln, Cys, Orn, homocysteine and acetyl phenylalanine, Xaa at position 22=Met, Leu or Nle, R₁ is OH or NH₂, and R₂ is Gly Pro Ser Ser Gly Ala Pro Pro Pro Ser (SEQ ID NO: 1421), Gly Pro Ser Ser Gly Ala Pro Pro Pro Ser Xaa (SEQ ID NO: 1450; wherein Xaa is Cys, Orn, homocystein or acetyl phenyalanine), COOH or CONH₂, wherein the peptide is optionally pegylated at position 16 of SEQ ID NO: 1413, position 19 of SEQ ID NO: 1414 and at positions 16 and 19 of SEQ ID NO: 1412. In some embodiments the Thr at position 24 of SEQ ID NOs: 1412-1414 and 1439 is substituted with Gly. In accordance with some embodiments the peptide comprises the sequence of SEQ ID NO: 13 or SEQ ID NO: 1414, wherein R₁ is OH. In accordance with some embodiments the peptide comprises the sequence of SEQ ID NO: 1413 or SEQ ID NO: 1414, wherein R₁ is OH and R₂ is CONH₂. In accordance with some embodiments the peptide comprises the sequence of SEQ ID NO: 1413 or SEQ ID NO: 1414, wherein R₁ is OH, R₂ is CONH₂ and the threonine at position 24 is substituted with glycine.

[0858] In some embodiments, a class 5 peptide is further modified to comprise one or more amino acids of native GLP-1 by substitution of the native glucagon residue(s) at corresponding amino acid positions. For example, the class 5 peptide may comprise one or more amino acid substitutions at any of positions 2, 3, 17, 18, 21, 23, and 24 (according to the amino acid numbering of native glucagon). In a specific embodiment, the class 5 peptide is modified by one or more of the following amino acid substitutions: Ser2 is replaced with Ala, Gln3 is replaced with Glu, Arg17 is replaced with Gln, Arg at position 18 is replaced with Ala, Asp at position 21 is replaced with Glu, Val at position 23 is replaced with Ile, and Gln at position 24 is replaced with Ala (amino acid positions are in accordance with the native glucagon sequence). In a specific embodiment, the class 5 peptide is modified by replacing Ser2 with Ala and Gln3 with Glu (according to the amino acid numbering of native glucagon). In another specific embodiment, the class 5 peptide is modified with all of the following amino acid substitutions: Arg17 is replaced with Gln, Arg at position 18 is replaced with Ala, Asp at position 21 is replaced with Glu, Val at position 23 is replaced with Ile, and Gln at position 24 is replaced with Ala (amino acid numbering according to native glucagon). In yet another specific embodiment, the class 5 peptide is modified to comprise just Glu at position 21 (according to the numbering of SEQ ID NO: 1401). Accordingly, the class 5 peptide can comprise the amino acid sequence of any of SEQ ID NOs: 1460-1470, 1473-1478, 1480-1488, 1490-1496, 1503, 1504, 1506, and 1514-1518.

[0859] Also provided herein is a class 5 peptide or conjugate thereof comprising (1) a stabilized alpha helix through means described herein (e.g., through an intramolecular bridge, or incorporation of one or more alpha, alpha-di-substituted amino acids, or an acidic amino acid at position 16 (according to the numbering of SEQ ID NO:1401), or a combination thereof; (2) a C-terminal amide or ester in place of a C-terminal carboxylate, and (3) a general structure of A-B-C,

wherein A is selected from the group consisting of

[0860] (i) phenyl lactic acid (PLA);

[0861] (ii) an oxy derivative of PLA; and

[0862] (iii) a peptide of 2 to 6 amino acids in which two consecutive amino acids of the peptide are linked via an ester or ether bond;

wherein B represents amino acids p to 26 of SEQ ID NO: 1401, wherein p is 3, 4, 5, 6, or 7, optionally comprising one or more amino acid modifications, as described herein, including, for example, any of the modifications described for Class 5 peptides. For instance the one or more modification may be selected from the group consisting of:

[0863] (iv) Asp at position 9 (according to the amino acid numbering of SEQ ID NO: 1401) is substituted with a Glu, a sulfonic acid derivative of Cys, homoglutamic acid, β-homoglutamic acid, or an alkylcarboxylate derivative of cysteine having the structure of:

[chemical structure]

wherein X₅ is C1-C4 alkyl, C2-C4 alkenyl, or C2-C4 alkynyl;

[0864] (v) substitution of one or two amino acids at positions 10, 20, and 24, (according to the amino acid numbering of SEQ ID NO: 1401) with an amino acid covalently attached to an acyl or alkyl group via an ester, ether, thioether, amide, or alkyl amine linkage;

[0865] (vi) substitution of one or two amino acids at positions 16, 17, 20, 21, and 24 (according to the amino acid numbering of SEQ ID NO: 1401) with an amino acid selected from the group consisting of: Cys, Lys, ornithine, homocysteine, and acetyl-phenylalanine (Ac-Phe), wherein the amino acid of the group is covalently attached to a hydrophilic moiety;

[0866] (vii) Asp at position 15 (according to the numbering of SEQ ID NO: 1401) is substituted with cysteic acid, glutamic acid, homoglutamic acid, and homocysteic acid;

[0867] (viii) Ser at position 16 (according to the numbering of SEQ ID NO: 1401) is substituted with cysteic acid, glutamic acid, homoglutamic acid, and homocysteic acid;

[0868] (ix) Arg at position 17 is replaced with Gln, Arg at position 18 is replaced with Ala, Asp at position 21 is replaced with Glu, Val at position 23 is replaced with Ile, and Gln at position 24 is replaced with Ala (according to amino acid numbering of SEQ ID NO: 1401);

[0869] (x) Ser at position 16 is replaced with Glu, Gln at position 20 is replaced with Glu, or Gln at position 24 is replaced with Glu (according to the amino acid numbering of SEQ ID NO: 1401);

wherein C (of the general structure of A-B-C) is selected from the group consisting of:

[0870] (vii) X;

[0871] (viii) X—Y;

[0872] (ix) X—Y—Z;

[0873] (x) X—Y—Z—R10;

wherein X is Met, Leu, or Nle; Y is Asn or a charged amino acid; Z is Thr, Gly, Cys, Lys, ornithine (Orn), homocysteine, acetyl phenylalanine (Ac-Phe), or a charged amino acid; wherein R10 is selected from a group consisting of SEQ ID NOs: 1421, 1426, 1427, and 1450.

[0874] In a specific aspect, the peptide comprises an oxy derivative of PLA. As used herein “oxy derivative of PLA” refers to a compound comprising a modified structure of PLA in which the hydroxyl group has been replaced with O—R₁₁, wherein R₁₁ is a chemical moiety. In this regard, the oxy derivative of PLA can be, for example, an ester of PLA or an ether of PLA.

[0875] Methods of making oxy derivatives of PLA are known in the art. For example, when the oxy derivative is an ester of PLA, the ester may be formed by upon reaction of the hydroxyl of PLA with a carbonyl bearing a nucleophile. The nucleophile can be any suitable nucleophile, including, but not limited to an amine or hydroxyl. Accordingly, the ester of PLA can comprise the structure of Formula IV:

[chemical structure]

wherein R₇ is an ester formed upon reaction of the hydroxyl of PLA with a carbonyl bearing a nucleophile.

[0876] The carbonyl bearing a nucleophile (which reacts with the hydroxyl of PLA to form an ester) can be, for example, a carboxylic acid, a carboxylic acid derivative, or an activated ester of a carboxylic acid. The carboxylic acid derivative can be, but is not limited to, an acyl chloride, an acid anhydride, an amide, an ester, or a nitrile. The activated ester of a carboxylic acid can be, for example, N-hydroxysuccinimide (NHS), tosylate (Tos), a carbodiimide, or a hexafluorophosphate. In some embodiments, the carbodiimide is 1,3-dicyclohexylcarbodiimide (DCC), 1,1′-carbonyldiimidazole (CDI), 1-ethyl-3-(3-dimethylaminopropyl)carbodiimide hydrochloride (EDC), or 1,3-diisopropylcarbodiimide (DICD). In some embodiments, the hexafluorophosphate is selected from a group consisting of hexafluorophosphate benzotriazol-1-yl-oxy-tris(dimethylamino)phosphonium hexafluorophosphate (BOP), benzotriazol-1-yl-oxytripyrrolidinophosphonium hexafluorophosphate (PyBOP), 2-(1H-7-azabenzotriazol-1-yl)-1,1,3,3-tetramethyl uronium hexafluorophosphate (HATU), and o-benzotriazole-N,N,N′,N′-tetramethyl-uronium-hexafluoro-phosphate (HBTU).

[0877] Methods of making ethers from reaction with a hydroxyl group (e.g., the hydroxyl of PLA) also are known in the art. For example, the hydroxyl group of PLA may be reacted with a halogenated alkyl or tosylated alkyl alcohol to form an ether bond.

[0878] In a specific embodiment, the chemical moiety bound to PLA via an oxygen-containing bond (e.g., via an ester or ether bond) is a polymer (e.g., a polyalkylene glycol), a carbohydrate, an amino acid, a peptide, or a lipid, e.g., a fatty acid or a steroid.

[0879] In a specific embodiment, the chemical moiety is an amino acid, which, optionally, is a part of a peptide, such that Formula IV is a depsipeptide. In this regard, PLA may be at a position other than the N-terminal amino acid residue of the peptide, such that the peptide comprises one or more (e.g., 1, 2, 3, 4, 5, 6, or more) amino acids N-terminal to the PLA residue. For example, the peptide can comprise PLA at position n, wherein n is 2, 3, 4, 5, or 6 of the peptide.

[0880] The amino acids N-terminal to the PLA residue may be synthetic or naturally-occurring. In a specific embodiment, the amino acids which are N-terminal PLA are naturally-occurring amino acids. In some embodiments, the amino acids which are N-terminal to PLA are the N-terminal amino acids of native glucagon. For example, the peptide can comprise at the N-terminus the amino acid sequence of any of SEQ ID NOs: 1452-1456, wherein PLA is linked to threonine via an ester bond:

SEQ ID NO: 1452
His-Ser-Gln-Gly-Thr-PLA
SEQ ID NO: 1453
Ser-Gln-Gly-Thr-PLA
SEQ ID NO: 1454
Gln-Gly-Thr-PLA
SEQ ID NO: 1455
Gly-Thr-PLA
SEQ ID NO: 1456
Thr-PLA

[0881] In an alternative embodiment, one or more of the N-terminal amino acids may be substituted with an amino acid other than the amino acid of native glucagon. For example, when the peptide comprises PLA as the amino acid at position 5 or 6, the amino acid at position 1 and/or position 2 may be an amino acid which reduces susceptibility to cleavage by dipeptidyl peptidase IV. More particularly, in some embodiments, position 1 of the peptide is an amino acid selected from the group consisting of D-histidine, alpha, alpha-dimethyl imidiazole acetic acid (DMIA), N-methyl histidine, alpha-methyl histidine, imidazole acetic acid, desaminohistidine, hydroxyl-histidine, acetyl-histidine and homo-histidine. More particularly, in some embodiments, position 2 of the antagonist/agonist peptide is an amino acid selected from the group consisting of D-serine, D-alanine, valine, glycine, N-methyl serine, N-methyl alanine, and aminoisobutyric acid (Aib). Also, for example, when the peptide comprises PLA as the amino acid at position 4, 5, or 6, the amino acid at position 3 of the peptide may be glutamic acid, as opposed to the native glutamine residue of native glucagon. In an exemplary embodiment of the invention, the peptide comprises at the N-terminus the amino acid sequence of any of SEQ ID NOs: 1457-1459.

[0882] With respect to the peptides comprising a compound of Formula IV, the polymer may be any polymer, provided that it can react with the hydroxyl group of PLA. The polymer may be one that naturally or normally comprises a carbonyl bearing a nucleophile. Alternatively, the polymer may be one which was derivatized to comprise the carbonyl bearing the carbonyl. The polymer may be a derivatized polymer of any of: polyamides, polycarbonates, polyalkylenes and derivatives thereof including, polyalkylene glycols, polyalkylene oxides, polyalkylene terepthalates, polymers of acrylic and methacrylic esters, including poly(methyl methacrylate), poly(ethyl methacrylate), poly(butylmethacrylate), poly(isobutyl methacrylate), poly(hexylmethacrylate), poly(isodecyl methacrylate), poly(lauryl methacrylate), poly(phenyl methacrylate), poly(methyl acrylate), poly(isopropyl acrylate), poly(isobutyl acrylate), and poly(octadecyl acrylate), polyvinyl polymers including polyvinyl alcohols, polyvinyl ethers, polyvinyl esters, polyvinyl halides, poly(vinyl acetate), and polyvinylpyrrolidone, polyglycolides, polysiloxanes, polyurethanes and co-polymers thereof, celluloses including alkyl cellulose, hydroxyalkyl celluloses, cellulose ethers, cellulose esters, nitro celluloses, methyl cellulose, ethyl cellulose, hydroxypropyl cellulose, hydroxy-propyl methyl cellulose, hydroxybutyl methyl cellulose, cellulose acetate, cellulose propionate, cellulose acetate butyrate, cellulose acetate phthalate, carboxylethyl cellulose, cellulose triacetate, and cellulose sulphate sodium salt, polypropylene, polyethylenes including poly(ethylene glycol), poly(ethylene oxide), and poly(ethylene terephthalate), and polystyrene.

[0883] The polymer can be a biodegradable polymer, including a synthetic biodegradable polymer (e.g., polymers of lactic acid and glycolic acid, polyanhydrides, poly(ortho)esters, polyurethanes, poly(butic acid), poly(valeric acid), and poly(lactide-cocaprolactone)), and a natural biodegradable polymer (e.g., alginate and other polysaccharides including dextran and cellulose, collagen, chemical derivatives thereof (substitutions, additions of chemical groups, for example, alkyl, alkylene, hydroxylations, oxidations, and other modifications routinely made by those skilled in the art), albumin and other hydrophilic proteins (e.g., zein and other prolamines and hydrophobic proteins)), as well as any copolymer or mixture thereof. In general, these materials degrade either by enzymatic hydrolysis or exposure to water in vivo, by surface or bulk erosion.

[0884] The polymer can be a bioadhesive polymer, such as a bioerodible hydrogel described by H. S. Sawhney, C. P. Pathak and J. A. Hubbell in Macromolecules, 1993, 26, 581-587, the teachings of which are incorporated herein, polyhyaluronic acids, casein, gelatin, glutin, polyanhydrides, polyacrylic acid, alginate, chitosan, poly(methyl methacrylates), poly(ethyl methacrylates), poly(butylmethacrylate), poly(isobutyl methacrylate), poly(hexylmethacrylate), poly(isodecyl methacrylate), poly(lauryl methacrylate), poly(phenyl methacrylate), poly(methyl acrylate), poly(isopropyl acrylate), poly(isobutyl acrylate), and poly(octadecyl acrylate).

[0885] In some embodiments, the polymer is a water-soluble polymer. Suitable water-soluble polymers are known in the art and include, for example, polyvinylpyrrolidone, hydroxypropyl cellulose (HPC; Klucel), hydroxypropyl methylcellulose (HPMC; Methocel), nitrocellulose, hydroxypropyl ethylcellulose, hydroxypropyl butylcellulose, hydroxypropyl pentylcellulose, methyl cellulose, ethylcellulose (Ethocel), hydroxyethyl cellulose, various alkyl celluloses and hydroxyalkyl celluloses, various cellulose ethers, cellulose acetate, carboxymethyl cellulose, sodium carboxymethyl cellulose, calcium carboxymethyl cellulose, vinyl acetate/crotonic acid copolymers, poly-hydroxyalkyl methacrylate, hydroxymethyl methacrylate, methacrylic acid copolymers, polymethacrylic acid, polymethylmethacrylate, maleic anhydride/methyl vinyl ether copolymers, poly vinyl alcohol, sodium and calcium polyacrylic acid, polyacrylic acid, acidic carboxy polymers, carboxypolymethylene, carboxyvinyl polymers, polyoxyethylene polyoxypropylene copolymer, polymethylvinylether co-maleic anhydride, carboxymethylamide, potassium methacrylate divinylbenzene co-polymer, polyoxyethyleneglycols, polyethylene oxide, and derivatives, salts, and combinations thereof.

[0886] In a specific embodiment, the polymer is a polyalkylene glycol, including, for example, polyethylene glycol (PEG).

[0887] The carbohydrate may be any carbohydrate provided that it comprises or is made to comprise a carbonyl with an alpha leaving group. The carbohydrate, for example, may be one which has been derivatized to comprise a carbonyl with an alpha leaving group. In this regard, the carbohydrate may be a derivatized form of a monosaccharide (e.g., glucose, galactose, fructose), a disaccharide (e.g., sucrose, lactose, maltose), an oligosaccharide (e.g., raffinose, stachyose), a polysaccharide (a starch, amylase, amylopectin, cellulose, chitin, callose, laminarin, xylan, mannan, fucoidan, galactomannan.

[0888] The lipid may be any lipid comprising a carbonyl with an alpha leaving group. The lipid, for example, may be one which is derivatized to comprise the carbonyl. In this regard, the lipid, may be a derivative of a fatty acid (e.g., a C4-C30 fatty acid, eicosanoid, prostaglandin, leukotriene, thromboxane, N-acyl ethanolamine), glycerolipid (e.g., mono-, di-, tri-substituted glycerols), glycerophospholipid (e.g., phosphatidylcholine, phosphatidylinositol, phosphatidylethanolamine, phosphatidylserine), sphingolipid (e.g., sphingosine, ceramide), sterol lipid (e.g., steroid, cholesterol), prenol lipid, saccharolipid, or a polyketide. In some embodiments, the lipid is an oil, wax, cholesterol, sterol, fat-soluble vitamin, monoglyceride, diglyceride, triglyceride, or a phospholipid.

[0889] In some embodiments, R₇ has a molecular weight of about 100 kDa or less, e.g., about 90 kDa or less, about 80 kDa or less, about 70 kDa or less, about 60 kDa or less, about 50 kDa or less, about 40 kDa or less. Accordingly, R7 can have a molecular weight of about 35 kDa or less, about 30 kDa or less, about 25 kDa or less, about 20 kDa or less, about 15 kDa or less, about 10 kDa or less, about 5 kDa or less, or about 1 kDa.

[0890] In an alternative embodiment, the peptide comprising the general structure of A-B-C comprises, as A, a peptide of 2 to 6 amino acids in which two consecutive amino acids of the peptide of A are linked via an ester or ether bond. The ester or ether bond may be, e.g., between amino acids 2 and 3, 3 and 4, 4 and 5, or 5 and 6. Optionally the peptide of A may be further modified by covalent linkage to another chemical moiety including linkage to a polymer (e.g. a hydrophilic polymer), alkylation, or acylation.

[0891] In a specific embodiment, the above-described class 5 peptide comprising PLA is modified to comprise an oxy derivative of PLA, such as, for instance, an ester of PLA or an ether of PLA. For example, the class 5 peptide can comprise the amino acid sequence of any of SEQ ID NOs: 1402, 1405-1420, 1422-1425, 1432-1436, 1438, 1439, 1445, 1446, and 1451, wherein the PLA is linked via an ester or ether bond to an amino acid, peptide, polymer, acyl group, or alkyl group. The amino acid, peptide, polymer, acyl group, or alkyl group may be any of those described herein. In the case that the PLA is linked via an ester bond to an amino acid or peptide, the class 5 peptide may be considered as a depsipeptide.

[0892] Also, in another specific embodiment, the above-described class 5 peptide which lacks PLA is modified to comprise at least one ester bond or ether bond between two consecutive amino acids which are N-terminal to the amino acid at position 7 (according to the numbering of native glucagon). In a specific embodiment, the class 5 peptide comprises at least one ester or ether bond between the two consecutive amino acids. In a more specific embodiment, the Class 5 peptide comprises the N-terminal 6 amino acids of SEQ ID NO: 1401 and two consecutive amino acids of the N-terminal 6 amino acids are linked via an ester or ether bond.

[0893] The peptide of A may comprise any amino acids, synthetic or naturally occurring, provided that at least two consecutive amino acids are linked via an ester or ether bond. In a specific embodiment, the peptide of A comprises amino acids of native glucagon. The amino acid at position 1 and/or position 2 may be an amino acid which reduces susceptibility to cleavage by dipeptidyl peptidase IV. For instance, the peptide of A can comprise at position 1 an amino acid selected from the group consisting of D-histidine, alpha, alpha-dimethyl imidiazole acetic acid (DMIA), N-methyl histidine, alpha-methyl histidine, imidazole acetic acid, desaminohistidine, hydroxyl-histidine, acetyl-histidine and homo-histidine. More particularly, in some embodiments, position 2 of the peptide of A is an amino acid selected from the group consisting of D-serine, D-alanine, valine, glycine, N-methyl serine, N-methyl alanine, and aminoisobutyric acid (Aib). Also, for example, the amino acid at position 3 of the peptide of A may be glutamic acid, as opposed to the native glutamine residue of native glucagon. Accordingly, the peptide of general structure of A-B-C can comprise an amino acid sequence of:

(SEQ ID NO: 1507)
Xaa1-Xaa2-Xaa3-Thr-Gly-Phe;
(SEQ ID NO: 1508)
Xaa2-Xaa3-Thr-Gly-Phe;
or
(SEQ ID NO: 1509)
Xaa3-Thr-Gly-Phe;

wherein Xaa1 is selected from a group consisting of: His, D-histidine, alpha, alpha-dimethyl imidiazole acetic acid (DMIA), N-methyl histidine, alpha-methyl histidine, imidazole acetic acid, desaminohistidine, hydroxyl-histidine, acetyl-histidine and homo-histidine; Xaa2 is selected from a group consisting of: Ser, D-serine, D-alanine, valine, glycine, N-methyl serine, N-methyl alanine, and aminoisobutyric acid (Aib); and Xaa3 is Gln or Glu.

[0894] In some embodiments, B is modified by up to three amino acid modifications. For example, B, which represents native amino acid sequence of SEQ ID NO: 1401 is modified by one or more conservative amino acid modifications.

[0895] In another embodiment, B comprises one or more amino acid modifications selected from the group consisting of (iv) to (x), as described herein. In a specific embodiment, B comprises one or both of the amino acid modifications (v) and (vi). In a further specific embodiment, B comprises one or a combination of amino acid modifications selected from the group consisting of (iv), (vii), (viii), (ix), and (x), in addition to (v) and (vi).

[0896] As described herein, the peptide comprising the general structure A-B-C may comprise one or more charged amino acids at the C-terminus, e.g., as Y and/or Z, as described herein. Alternatively or additionally, the peptide comprising the general structure A-B-C may further comprise one to two charged amino acids C-terminal to Z, when C comprises X—Y—Z. The charged amino acids can be, for example, one of Lys, Arg, His, Asp, and Glu. In a specific embodiment, Y is Asp.

[0897] In some embodiments, the peptide comprising the general structure A-B-C comprises a hydrophilic moiety covalently bound to an amino acid residue at position 1, 16, 20, 21, or 24 (according to the amino acid numbering of SEQ ID NO: 1401), or at the N- or C-terminal residue of the peptide comprising the general structure A-B-C. In a specific embodiment, the hydrophilic moiety is attached to a Cys residue of the peptide comprising the general structure A-B-C. In this regard, the amino acid at position 16, 21, 24, or 29 of native glucagon (SEQ ID NO: 1401) may be substituted with a Cys residue. Alternatively, a Cys residue comprising a hydrophilic moiety may be added to the C-terminus of the peptide comprising the general structure A-B-C as position 30 or as position 40, e.g., when the peptide comprising the general structure A-B-C comprises a C-terminal extension (positions according to the amino acid numbering of SEQ ID NO: 1401). Alternatively, the hydrophilic moiety may be attached to the PLA of the peptide comprising the general structure A-B-C via the hydroxyl moiety of PLA. The hydrophilic moiety can be any of those described herein, including, for example, polyethylene glycol.

[0898] In a specific aspect, the peptide comprising the general structure A-B-C comprises a stabilized alpha helix by virtue of incorporation of an intramolecular bridge. In some embodiments, the intramolecular bridge is a lactam bridge. The lactam bridge may be between the amino acids at positions 9 and 12, the amino acids at positions 12 and 16, the amino acids at positions 16 and 20, the amino acids at positions 20 and 24, or the amino acids at positions 24 and 28 (according to the amino acid numbering of SEQ ID NO: 1401). In a specific embodiment, the amino acids at positions 12 and 16 or at positions 16 and 20 (according to the amino acid numbering of SEQ ID NO: 1401) are linked via a lactam bridge. Other positions of the lactam bridge are contemplated.

[0899] Additionally or alternatively, the peptide comprising the general structure A-B-C can comprise an alpha, alpha di-substituted amino acid at, for example, any of positions 16, 20, 21, or 24 (according to the amino acid numbering of SEQ ID NO: 1401). In some embodiments, the alpha, alpha di-substituted amino acid is Aib. In a specific aspect, the Aib is located at position 16 (according to the numbering of SEQ ID NO: 1401).

[0900] Alternatively or additionally, the peptide comprising the general structure A-B-C may be modified to comprise an acidic amino acid at position 16 (according to the numbering of SEQ ID NO: 1401), which modification enhances the stability of the alpha helix. The acidic amino acid, in some embodiments, is an amino acid comprising a side chain sulfonic acid or a side chain carboxylic acid. In a more specific embodiment, the acidic amino acid is selected from the group consisting of Glu, Asp, homoglutamic acid, a sulfonic acid derivative of Cys, cysteic acid, homocysteic acid, Asp, and an alkylated derivative of Cys having the structure of

[chemical structure]

wherein X₅ is C1-C4 alkyl, C2-C4 alkenyl, or C2-C4 alkynyl.

[0901] In a specific embodiment, the Class 5 peptide may comprise the amino acid sequence of any of SEQ ID NOs: 1460-1470, 1473-1478, 1480-1488, 1490-1496, 1503, 1504, 1506, and 1514-1518, or comprising the amino acid sequence of any of Peptides 2-6 of Table 13, Peptides 1-8 of Table 14, and Peptides 2-6, 8, and 9 of Table 15.

TABLE 13
Lactam, Cex glucagon(6-39) peptides and glucagon antagonist and GLP-1 agonist activity

| | | | GLP-1 ECₛₒ | Glu ICₛₒ |
|---|---|---|---|---|
| | | | (nM) | (nM) |
| 1 | E9, K12, E16 | FTSEYSKYLDERRAQDFVQWLMNTGPSSGAPPPS | 1451 | 762 |
| 2 | E9, K12E16(lactam) | FTSEYSKYLDERRAQDFVQWLMNTGPSSGAPPPS | 63 | 2008 |
| 3 | E9, E16K20(lactam) | FTSEYSKYLDERRAKDFVQWLMNTGPSSGAPPPS | 36 | 42 |
| 4 | D9, K12E16(Lactam) | FTSDYSKYLDERRAQDFVQWLMNTGPSSGAPPPS | 118.7 | 828 |
| 5 | [PLA6, E9, K12E16(Lactam) | PLA-TSEYSKYLDERRAQDFVQWLMNTGPSSGAPPPS | 6 | 72 |
| 6 | [PLA6, E9, E16K20(Lactam)] | PLA-TSEYSKYLDERRAKDFVQWLMNTGPSSGAPPPS | 20 | 20 |

TABLE 14
Lactam glucagon(1-29, 2-29, 4-29 and 6-29) peptides and
their glucagon antagonist and GLP-1 agonist activity

| | | GLP-1 | Glucagon |
|---|---|---|---|
| | | EC50 | IC50 |
| | | (nM) | (nM) |
| | Glucagon | | 0.2~1.0* |
| | HSQGTFTSDYSKYLDSRRAQDFVQWLMNT | | |
| | GLP-1 (aa 1-30) | 0.02~0.1 | |
| | HAEGTFTSDVSSYLEGQAAKEFIAWlVKGR | | |
| 1 | [PLA6, D9, E16K20(lactam), D28]G(6-29) | 5~25 | 10~30 |
| | PLA TSDYSKYLDERRAKDFVQWLMDT | | |
| 2 | [PLA6, D9, K12E16(Lactam), D28]G(6-29) | 177 | 63 |
| | PLA TSDYSKYLDERRAQDFVQWLMDT | | |
| 3 | [PLA6, D9, E16, K20E24(Lactam), D28]G(6-29) | 239 | 74 |
| | PLA TSDYSKYLDERRAKDFVEWLMDT | | |
| 4 | [PLA6, D9, E16, E24K28(lactam)]G(6~29) | 289 | 22 |
| | PLA TSDYSKYLDERRAQDFVEWLMKT | | |
| 5 | [E9, E16K20(lactam), D28]G(4~29) | 151 | 10~30 |
| | GTFTSEYSKYLDERRAKDFVQWLMDT | | |
| 6 | [E9, E16K20(lactam), D28]G(2~29) | 203 | 49 (PA) |
| | SQGTFTSEYSKYLDERRAKDFVQWLMDT | | |
| 7 | [A2E3, E16K20(Lactam), D28]G(2~29) | 175 | 63 |
| | AEGTFTSEYSKYLDERRAKDFVQWLMDT | | |
| 8 | [A2E3, E16K20(Lactam), D28]G(1~29) | 0.2 | 130 (PA) |
| | HAEGTFTSEYSKYLDERRAKDFVQWLMDT | | |
| 9 | ANK2 (Bayer peptide) | 0.28 | agonist |
| | HSQGTFTSDY ARYLDARRAREFIKWL VRGRG | | |

*EC50 at glucagon receptor
(PA =partial antagonist)

TABLE 15
Profile of Mixed Agonist/Antagonist
Glucagon (6-CEX) Analogs

| | | | | |
|---|---|---|---|---|
| 1 | E9, K12, E16 | FTSEYSKYLDERRAQDFVQWLMNTGPSSGAPPPS | 1451 | 762 |
| 2 | E9, K12E16(lactam) | FTSEYSKYLDERRAQDFVQWLMNTGPSSGAPPPS | 63 | 2008 |
| 3 | E9, E16K20(lactam) | FTSEYSKYLDERRAKDFVQWLMNTGPSSGAPPPS | 36 | 42 |
| 4 | D9, K12E20(lactam) | FTSDYSKYLDERRAQDFVQWL1MNTGPSSGAPPPS | 18 | 828 |
| 5 | [PLA6, E9, K12E20(lactam) | PLA-TSEYSKYLDERRAQDFVQWLMNTGPSSGAPPPS | 6 | 72 |
| 6 | [PLA6, E9, E16K20(Lactam)] | PLA-TSEYSKYLDERRAKDFVQWLMNTGPSSGAPPPS | 20 | 20 |

Glucagon D⁹(6-29) analogs

| | | | GLP-1 | Glucagon |
|---|---|---|---|---|
| | | | EC50 (nM) | IC50 (nM) |
| 7 | PLA 6, D9, D28 | PLA-TSDYSKYLDSRRAQDFVQWLMDT | −700 | tbd |
| 8 | PLA6, D9, K12E20(Lactam) | PLA-TSDYSKYLDERRAQDFVQWLMDT | 21 | 13 |
| 9 | PLA6, D9, E16K20(lactam) | PLA-TSDYSKYLDERRAKDFVQWLMDT | 4 | 6 |

[0902] In some embodiments, the peptide comprising the general structure A-B-C is a Class peptide. In a specific embodiment, the peptide exhibits exhibits at least about 50% of the maximum agonism achieved by native GLP-1 at the GLP-1 receptor and at least about 50% inhibition of the maximum response achieved by native glucagon at the glucagon receptor. In another specific embodiment, the peptide exhibits at least about 55%, at least about 60%, at least about 70%, at least about 80%, at least about 90%, at least about 95%, or about 100% of the maximum agonism achieved by native GLP-1 at the GLP-1 receptor. Alternatively or additionally, the peptide may exhibit at least about 55%, at least about 60%, at least about 70%, at least about 80%, at least about 90%, at least about 95%, or about 100% inhibition of the maximum response achieved by native glucagon at the glucagon receptor.

[0903] In some embodiments, a peptide with Class 5 peptide or conjugate thereof, is provided comprising:

(1) modifications that confer glucagon antagonist activity, including but not limited to:

[0904] (a) substitution of the Phe at position 6 with PLA (according to amino acid numbering of wild type glucagon), optionally with deletion of 1 to 5 amino acids from the N-terminus of wild type glucagon; or

[0905] (b) deletion of 2 to 5 amino acids from the N-terminus of wild type glucagon; optionally with substitution of Asp at position 9 of wild type glucagon with glutamic acid, homoglutamic acid or a sulfonic acid derivative of cysteine (according to amino acid numbering of wild type glucagon); and

(2) modifications that confer GLP-1 agonist activity, including but not limited to:

[0906] (a) insertion or substitution of α,α-disubstituted amino acid within amino acids 12-29 of wild type glucagon, e.g. at one, two, three, four or more of positions 16, 17, 18, 19, 20, 21, 24 or 29 (according to the amino acid numbering of wild type glucagon); or

[0907] (b) introduction of an intramolecular bridge within amino acids 12-29 of wild type glucagon, e.g. a salt bridge or a lactam bridge or another type of covalent bond; or

[0908] (c) substitution of the amino acid at one or more of positions 2, 3, 17, 18, 21, 23, or 24 (according to the amino acid numbering of native glucagon) with the corresponding amino acid of GLP-1, e.g. Ser2 is replaced with Ala, Gln3 is replaced with Glu, Arg17 is replaced with Gln, Arg at position 18 is replaced with Ala, Asp at position 21 is replaced with Glu, Val at position 23 is replaced with Ile, and/or Gln at position 24 is replaced with Ala; or

[0909] (d) other modifications that stabilize the alpha-helix structure around amino acid positions 12-29 according to the amino acid numbering of wild type glucagon; and

(3) other modifications that enhance GLP-1 agonist activity, e.g. a C-terminal amide or ester in place of a C-terminal carboxylate; and optionally
(4) one or more of the following modifications:

[0910] (a) covalent attachment to a hydrophilic moiety, such as polyethylene glycol, e.g. at the N-terminus, or at position 6, 16, 17, 20, 21, 24, 29, 40 or at the C-terminal amino acid; and/or

[0911] (b) acylation or alkylation; and optionally

(5) one or more of the following additional modifications:

[0912] (a) covalent linkage of amino acids, to the N-terminus, e.g. 1-5 amino acids to the N-terminus, optionally via an ester bond to PLA at position 6 (according to the numbering of wild type glucagon), optionally together with modifications at position 1 or 2, e.g. as described herein, that improve resistance to DPP-IV cleavage;

[0913] (b) deletion of amino acids at positions 29 and/or 28, and optionally position 27 (according to the numbering of wild type glucagon);

[0914] (c) covalent linkage of amino acids to the C-terminus;

[0915] (d) non-conservative substitutions, conservative substitutions, additions or deletions while retaining desired activity, for example, conservative substitutions at one or more of positions 2, 5, 7, 10, 11, 12, 13, 14, 16, 17, 18, 19, 20, 21, 24, 27, 28 or 29, substitution of Tyr at position 10 with Val or Phe, substitution of Lys at position 12 with Arg, substitution of one or more of these positions with Ala;

[0916] (e) modification of the aspartic acid at position 15, for example, by substitution with glutamic acid, homoglutamic acid, cysteic acid or homocysteic acid, which may reduce degradation; or modification of the serine at position 16, for example, by substitution of threonine, Aib, glutamic acid or with another negatively charged amino acid having a side chain with a length of 4 atoms, or alternatively with any one of glutamine, homoglutamic acid, or homocysteic acid, which likewise may reduce degradation due to cleavage of the Asp15-Ser16 bond;

[0917] (f) modification of the methionine at position 27, for example, by substitution with leucine or norleucine, to reduce oxidative degradation;

[0918] (g) modification of the Gln at position 20 or 24, e.g. by substitution with Ala or Aib, to reduce degradation that occurs through deamidation of Gln

[0919] (h) modification of Asp at position 21, e.g. by substitution with Glu, to reduce degradation that occurs through dehydration of Asp to form a cyclic succinimide intermediate followed by isomerization to iso-aspartate;

[0920] (j) homodimerization or heterodimerization as described herein; and

[0921] (k) combinations of the above.

[0922] It is understood that any of the modifications within the same class may be combined together and/or modifications of different classes are combined. For example, the modifications of (1)(a) may be combined with (2)(a) and (3); (1)(a) may be combined with (2)(b), e.g. lactam bridge or salt bridge, and (3); (1)(a) may be combined with (2)(c) and (3); (1)(b) may be combined with (2)(a) and (3); (1)(b) may be combined with (2)(b), e.g. lactam bridge or salt bridge, and (3); (1)(b) may be combined with (2)(c) and (3); any of the foregoing may be combined with (4)(a) and/or (4)(b); and any of the foregoing may be combined with any of (5)(a) through (5)(k).

[0923] In exemplary embodiments, the α,α-disubstituted amino acid Aib is substituted at one, two, three or all of positions 16, 20, 21, or 24 (according to the amino acid numbering of wild type glucagon).

[0924] In exemplary embodiments, the intramolecular bridge is a salt bridge.

[0925] In other exemplary embodiments, the intramolecular bridge is a covalent bond, e.g. a lactam bridge. In some embodiments, the lactam bridge is between the amino acids at positions

[0926] 9 and 12, the amino acids at positions 12 and 16, the amino acids at positions 16 and 20, the amino acids at positions 20 and 24, or the amino acids at positions 24 and 28 (according to the amino acid numbering of SEQ ID NO: 1401).

[0927] In exemplary embodiments, acylation or alkylation is at position 6, 10, 20 or 24 or the N-terminus or C-terminus (according to the amino acid numbering of wild type glucagon) SEQ ID NO: 1401).

[0928] In exemplary embodiments, modifications include:

[0929] (i) substitution of Asp at position 15 (according to the numbering of SEQ ID NO: 1401) with cysteic acid, glutamic acid, homoglutamic acid, and homocysteic acid;

[0930] (ii) substitution of Ser at position 16 (according to the numbering of SEQ ID NO: 1401) with cysteic acid, glutamic acid, homoglutamic acid, and homocysteic acid;

[0931] (iii) substitution of Asn at position 28 with a charged amino acid;

[0932] (iv) substitution of Asn at position 28 with a charged amino acid selected from the group consisting of Lys, Arg, His, Asp, Glu, cysteic acid, and homocysteic acid;

[0933] (v) substitution at position 28 with Asn, Asp, or Glu;

[0934] (vi) substitution at position 28 with Asp;

[0935] (vii) substitution at position 28 with Glu;

[0936] (viii) substitution of Thr at position 29 with a charged amino acid;

[0937] (ix) substitution of Thr at position 29 with a charged amino acid selected from the group consisting of Lys, Arg, His, Asp, Glu, cysteic acid, and homocysteic acid;

[0938] (x) substitution at position 29 with Asp, Glu, or Lys;

[0939] (xi) substitution at position 29 with Glu;

[0940] (xii) insertion of 1-3 charged amino acids after position 29;

[0941] (xiii) insertion after position 29 of Glu or Lys;

[0942] (xiv) insertion after position 29 of Gly-Lys or Lys-Lys;

[0943] or combinations thereof.

[0944] Any of the modifications described above which increase GLP-1 receptor agonist activity, glucagon receptor antagonist activity, peptide solubility, and/or peptide stability can be applied individually or in combination.

### Modification to Enhance Stability

[0945] In accordance with some embodiments the Class 5 peptides disclosed herein can be further modified to include the amino acid sequence of SEQ ID NO: 1421 (GPSSGAPPPS), or SEQ ID NO: 1450, linked to the carboxy terminal amino acid (position 24) of the Class 5 peptide and administered to individuals to induce weight loss or assist in weight maintenance. More particularly, the Class 5 peptide comprises a sequence selected from the group consisting of SEQ ID NO: 1405, SEQ ID NO: 1406, SEQ ID NO: 1407, SEQ ID NO: 1408, SEQ ID NO: 1409, SEQ ID NO: 1412, SEQ ID NO: 1413, SEQ ID NO: 1414, SEQ ID NO: 1416, SEQ ID NO: 1417, SEQ ID NO: 1418, SEQ ID NO: 1419, SEQ ID NO: 1422, SEQ ID NO: 1423, SEQ ID NO: 1424 and SEQ ID NO: 1425 and further comprising the amino acid sequence of SEQ ID NO: 1421 (GPSSGAPPPS), or SEQ ID NO: 1450, linked to the carboxy terminal amino acid (position 24) of the peptide or Class 5 peptide, is used to suppress appetite and inducing weight loss/weight maintenance. In some embodiments the administered peptide or Class 5 peptide comprises a sequence selected from the group consisting of SEQ ID NO: 1416, SEQ ID NO: 1417, SEQ ID NO: 1418 and SEQ ID NO: 1419, further comprising the amino acid sequence of SEQ ID NO: 1421 (GPSSGAPPPS) linked to the carboxy terminal amino acid (position 24) of the Class 5 peptide. In some embodiments the method comprises administering a peptide or Class 5 peptide comprising the sequence of SEQ ID NO: 1445 or SEQ ID NO: 1446.

[0946] Accordingly, it is expected that the Class 5 peptides disclosed herein can be similarly modified to decrease their susceptibility to premature chemical cleavage in aqueous buffers. In accordance with some embodiments the Class 5 peptides described herein can be further modified to enhance their stability in aqueous solutions by replacing the native aspartic amino acid, located at corresponding position 15 of native glucagon, with an amino acid selected from the group consisting of cysteic acid, glutamic acid, homoglutamic acid and homocysteic acid. In accordance with some embodiments the aspartic acid residue at position 10 of class 5 peptide of SEQ ID NO: 1405, SEQ ID NO: 1406, SEQ ID NO: 1407 or SEQ ID NO: 1408 can be substituted with an amino acid selected from the group consisting of cysteic acid, glutamic acid, homoglutamic acid and homocysteic acid, and in some embodiments the native aspartic acid at position 10 of SEQ ID NO: 1405, SEQ ID NO: 1406, SEQ ID NO: 1407 or SEQ ID NO: 1408 is replaced with glutamic acid. In accordance with some embodiments a class 5 peptide having improved stability in aqueous solutions is provided wherein the antagonist comprises a modified sequence of SEQ ID NO: 1409, wherein the modification comprises substitution of the Asp at position 10 of SEQ ID NO: 1409 with Glu. In some embodiments a class 5 peptide is provided comprising a sequence selected form the group consisting of SEQ ID NO: 1422, SEQ ID NO: 1423, SEQ ID NO: 1424 and SEQ ID NO: 1425. In some embodiments the class 5 peptide is amidated.

[0947] The Asp-Ser sequence at position 15-16 of native glucagon has been identified as a uniquely unstable dipeptide that leads to premature chemical cleavage of the native hormone in aqueous buffers. For example, when maintained at 0.01N HCl at 37° C. for 2 weeks, more than 50% of the native glucagon may be cleaved into fragments. The two liberated cleavage peptides 1-15 and 16-29 are devoid of glucagon-like biological activity and thus represent a limitation on the aqueous pre-formulation of glucagon and its related analogs. The selective chemical substitution of the Asp at position 15 of native glucagon with Glu has been observed to virtually eliminate chemical cleavage of the 15-16 peptide bond.

[0948] In yet further exemplary embodiments, any of the foregoing compounds can be further modified to improve stability by modifying the amino acid corresponding to position 15 or 16 of native glucagon, to reduce degradation of the peptide over time, especially in acidic or alkaline buffers.

### Modification to Enhance Solubility

[0949] The class 5 peptide can be further modified to improve the peptide's solubility in aqueous solutions at physiological pH, in certain aspects, while retaining the glucagon antagonist and GLP-1 agonist activity. Introduction of hydrophilic groups at positions corresponding to positions 12, 15, 16, 19 and 24 of the peptide of SEQ ID NO: 1405, or at positions 12, 16, 19 or 24 of the peptide of SEQ ID NO: 1406 can improve the solubility of the resulting peptides in solutions having a physiological pH, while retaining the parent compounds glucagon antagonist and GLP agonist activity. Therefore, in some embodiments the presently disclosed class 5 peptide that are further modified to comprise one or more hydrophilic groups covalently linked to the side chains of amino acids corresponding to amino acid positions 12, 15, 16, 19 and 24 of the peptide of SEQ ID NO: 1405 or SEQ ID NO: 1406. In a further embodiment the side chains of amino acids corresponding to amino acid positions 16 and 19 of SEQ ID NO: 1405 or SEQ ID NO: 1406 are covalently bound to hydrophilic groups, and in some embodiments the hydrophilic group is polyethylene glycol (PEG).

[0950] Class 5 glucagon related peptides can be modified by introducing charge at its carboxy terminus to enhance the solubility of the peptide while retaining the agonist properties of the peptide. The enhanced solubility allows for the preparation and storage of glucagon solutions at near neutral pH. Formulating glucagon solutions at relatively neutral pHs (e.g. pH of about 6.0 to about 8.0) improves the long term stability of the Class 5 peptides.

[0951] Applicants anticipate that class 5 peptides disclosed herein can be similarly modified to enhance their solubility in aqueous solutions at relatively neutral pH (e.g. pH of about 6.0 to about 8.0), in some cases, while retaining a glucagon antagonist and GLP-1 activity. Accordingly, some embodiments is directed to a glucagon antagonist/GLP-1 of SEQ ID NO: 1405, SEQ ID NO: 1406, SEQ ID NO: 1407 or SEQ ID NO: 1408 that has been further modified relative to the native amino acids present at positions 6-29 of the wild type glucagon (SEQ ID NO: 1401) to add charge to the peptide by the substitution of native non-charged amino acids with charged amino acids, or the addition of charged amino acids to the carboxy terminus In accordance with some embodiments, one to three of the non-charged native amino acids of the class 5 peptides disclosed herein are replaced with a charged amino acid. In some embodiments the charged amino acid is selected from the group consisting of lysine, arginine, histidine, aspartic acid and glutamic acid. More particularly, applicants have discovered that substituting the normally occurring amino acid corresponding to position 28 and/or 29 (relative to native glucagon) with charged amino acids, and/or the addition of one to two charged amino acids at the carboxy terminus of the peptide, enhances the solubility and stability of the Class 5 peptide in aqueous solutions at physiologically relevant pHs (i.e., a pH of about 6.5 to about 7.5). Accordingly such modifications of class 5 peptides are anticipated to have a similar effect on the solubility in aqueous solutions, particularly at a pH ranging from about 5.5 to about 8.0, while retaining the parent peptides biological activity.

[0952] In accordance with some embodiments the class 5 peptide of SEQ ID NO: 1405, SEQ ID NO: 1406, SEQ ID NO: 1407 or SEQ ID NO: 1408 is modified by the substitution of the native amino acid at position 23 and/or 24 of those sequences with a negatively charged amino acid (e.g., aspartic acid or glutamic acid) and optionally the addition of a negatively charged amino acid (e.g., aspartic acid or glutamic acid) to the carboxy terminus of the peptide. In an alternative embodiment a class 5 peptide comprising SEQ ID NO: 1405, SEQ ID NO: 1406, SEQ ID NO: 1407 or SEQ ID NO: 1408 is modified by the substitution of the native amino acid at position 24 of SEQ ID NO: 1405, SEQ ID NO: 1406, SEQ ID NO: 1407 or SEQ ID NO: 1408 with a positively charged amino acid (e.g., lysine, arginine or histidine) and optionally the addition of one or two positively charged amino acid (e.g., lysine, arginine or histidine) on the carboxy terminus of the peptide. In accordance with some embodiments a class 5 peptide having improved solubility and stability is provided wherein the analog comprises the amino acid sequence of SEQ ID NO: 1415 or SEQ ID NO: 1451 with the proviso that at least one amino acids at position, 23, or 24 of SEQ ID NO: 1415 or SEQ ID NO: 1451 is substituted with an acidic amino acid and/or an additional acidic amino acid added at the carboxy terminus of SEQ ID NO: 1415 or SEQ ID NO: 1451. In some embodiments the acidic amino acids are independently selected from the group consisting of Asp, Glu, cysteic acid and homocysteic acid.

[0953] In accordance with some embodiments a class 5 peptide having improved solubility and stability is provided wherein the antagonist comprises the amino acid sequence of SEQ ID NO: 1416, SEQ ID NO: 1417, SEQ ID NO: 1418 or SEQ ID NO: 1419. In accordance with some embodiments a glucagon agonist is provided comprising the sequence of SEQ ID NO: 1416 or SEQ ID NO: 1417. In some embodiments the class 5 peptide comprises the sequence of SEQ ID NO: 1420.

[0954] In accordance with some embodiments a class 5 peptide is provided comprising the sequence of SEQ ID NO: 1415 or SEQ ID NO: 1451. In some embodiments, position 4 of SEQ ID NO: 1415 or SEQ ID NO: 1451 is aspartic acid, glutamic acid, homoglutamic acid, cysteic acid or homocysteic acid, and in some embodiments position 4 is aspartic acid, glutamic acid, cysteic acid or homocysteic acid, and in a further embodiment position 4 of SEQ ID NO: 1415 or SEQ ID NO: 1451 is aspartic acid or glutamic acid, and in some embodiments position 4 of SEQ ID NO: 1415 or SEQ ID NO: 1451 is aspartic acid. In some embodiments a class 5 peptide is provided comprising the sequence of SEQ ID NO: 1415 or SEQ ID NO: 1451 wherein position 4 of SEQ ID NO: 1415 is aspartic acid and position 10 of SEQ ID NO: 1415 is glutamic acid. In a further embodiment the C-terminal amino acid of SEQ ID NO: 1415 or SEQ ID NO: 1451 is modified to replace the native carboxylic acid group with a charge-neutral group, such as an amide or ester.

### Class 5 Peptide Fusions

[0955] In a further embodiment, the carboxy terminal amino acid of the Class 5 peptide described herein is covalently bound to a second peptide comprising a sequence selected from the group consisting of SEQ ID NOs: 1421, 1426, 1427, and 1450. For example, in some embodiments, the Class 5 peptide of SEQ ID NO: 1415, SEQ ID NO: 1451, SEQ ID NO: 1405, SEQ ID NO: 1406, SEQ ID NO: 1407, SEQ ID NO: 1408, SEQ ID NO: 1412, SEQ ID NO: 1413, SEQ ID NO: 1414, SEQ ID NO: 1416, SEQ ID NO: 1417, SEQ ID NO: 1418, SEQ ID NO: 1419, SEQ ID NO: 1422, SEQ ID NO: 1423, SEQ ID NO: 1424 and SEQ ID NO: 1425 is covalently bound to a second peptide comprising a sequence selected from the group consisting of SEQ ID NO: 1421 (GPSSGAPPPS), SEQ ID NO: 1426 (KRNRNNIA), SEQ ID NO: 1427 (KRNR) and SEQ ID NO: 1450 (GPSSGAPPPSX).

[0956] In some embodiments a class 5 peptide dimer is provided comprising two sequences independently selected from the group consisting of SEQ ID NO: 1405, SEQ ID NO: 1406, SEQ ID NO: 1407, SEQ ID NO: 1408, SEQ ID NO: 1409, SEQ ID NO: 1422, SEQ ID NO: 1423, SEQ ID NO: 1424 and SEQ ID NO: 1425 that further comprises an amino acid sequence of SEQ ID NO: 1421 (GPSSGAPPPS) linked to the carboxy terminal amino acid of the class 5 peptide.

[0957] In some embodiments, the class 5 peptide is further modified by truncation or deletion of one or two amino acids of the C-terminus of the peptide (i.e., truncation of the amino acid at position 29 or at positions 28 and 29 of native glucagon). Preferably truncation does not effect activity (e.g., glucagon antagonism/GLP-1 agonism) of a class 5 peptide.

### Class 5 Peptide Conjugates

[0958] Conjugates of Class 5 peptides are also provided, in which the glucagon peptide is linked, optionally via covalent bonding and optionally via a linker, to a conjugate moiety.

[0959] In those embodiments wherein the class 5 peptide comprises a polyethylene glycol chain, the polyethylene glycol chain may be in the form of a straight chain or it may be branched. In accordance with some embodiments the polyethylene glycol chain has an average molecular weight selected from the range of about 500 to about 10,000 Daltons. In some embodiments the polyethylene glycol chain has an average molecular weight selected from the range of about 1,000 to about 5,000 Daltons. In some embodiments the polyethylene glycol chain has an average molecular weight selected from the range of about 1,000 to about 5,000 Daltons. In some embodiments the polyethylene glycol chain has an average molecular weight selected of about 1,000 to about 2,000 Daltons. In some embodiments the polyethylene glycol chain has an average molecular weight of about 1,000 Daltons.

[0960] In some embodiments the pegylated class 5 peptide comprises a peptide consisting of the sequence of SEQ ID NO: 1415 or SEQ ID NO: 1451 wherein the polyethylene glycol chain is linked to an amino acid selected from positions 11, 12, 15, 16, 19 and 24 of SEQ ID NO: 1415 or SEQ ID NO: 1451, and the molecular weight of the PEG chain is about 1,000 to about 5,000 Daltons. In some embodiments the pegylated class 5 peptide comprises a peptide consisting of the sequence of SEQ ID NO: 1415 or SEQ ID NO: 1451 wherein the polyethylene glycol chain is linked to the amino acid at position 16 or 19 of SEQ ID NO: 1415 or SEQ ID NO: 1451, and the molecular weight of the PEG chain is about 1,000 to about 5,000 Daltons. In a further embodiment the modified class 5 peptide comprises two or more polyethylene glycol chains covalently bound to the peptide wherein the total molecular weight of the glucagon chains is about 1,000 to about 5,000 Daltons. In some embodiments the class 5 peptide comprises the sequence of SEQ ID NO: 1415 or SEQ ID NO: 1451 wherein a polyethylene glycol chain is linked to the amino acid at positions 16 and 19 of SEQ ID NO: 1415 or SEQ ID NO: 1451 and the combined molecular weight of the two PEG chains is about 1,000 to about 5,000 Daltons.

[0961] The class 5 glucagon related peptide may comprise the amino acid sequence of any of SEQ ID NOs: 1401-1518, optionally with up to 1, 2, 3, 4, or 5 further modifications that retain glucagon antagonist and GLP-1 agonist activity.

### The Linking Group (L)

[0962] As described herein, the present disclosures provide glucagon superfamily peptides conjugated with GR ligands having the formula Q-L-Y, wherein L is a linking group or a chemical bond. In some embodiments, L is stable in vivo. In some embodiments, L is hydrolyzable in vivo. In some embodiments, L is metastable in vivo.

[0963] Q and Y can be linked together through L using standard linking agents and procedures known to those skilled in the art. In some aspects, Q and Y are fused directly and L is a bond. In other aspects, Q and Y are fused through a linking group L. For example, in some embodiments, Q and Y are linked together via a peptide bond, optionally through a peptide or amino acid spacer. In some embodiments, Q and Y are linked together through chemical conjugation, optionally through a linking group (L). In some embodiments, L is directly conjugated to each of Q and Y.

[0964] Chemical conjugation can occur by reacting a nucleophilic reactive group of one compound to an electrophilic reactive group of another compound. In some embodiments when L is a bond, Q is conjugated to Y either by reacting a nucleophilic reactive moiety on Q with an electrophilic reactive moiety on Y, or by reacting an electrophilic reactive moiety on Q with a nucleophilic reactive moiety on Y. In embodiments when L is a group that links Q and Y together, Q and/or Y can be conjugated to L either by reacting a nucleophilic reactive moiety on Q and/or Y with an electrophilic reactive moiety on L, or by reacting an electrophilic reactive moiety on Q and/or Y with a nucleophilic reactive moiety on L. Nonlimiting examples of nucleophilic reactive groups include amino, thiol, and hydroxyl. Nonlimiting examples of electrophilic reactive groups include carboxyl, acyl chloride, anhydride, ester, succinimide ester, alkyl halide, sulfonate ester, maleimido, haloacetyl, and isocyanate. In embodiments where Q and Y are conjugated together by reacting a carboxylic acid with an amine, an activating agent can be used to form an activated ester of the carboxylic acid.

[0965] The activated ester of the carboxylic acid can be, for example, N-hydroxysuccinimide (NHS), tosylate (Tos), mesylate, triflate, a carbodiimide, or a hexafluorophosphate. In some embodiments, the carbodiimide is 1,3-dicyclohexylcarbodiimide (DCC), 1,1′-carbonyldiimidazole (CDI), 1-ethyl-3-(3-dimethylaminopropyl)carbodiimide hydrochloride (EDC), or 1,3-diisopropylcarbodiimide (DICD). In some embodiments, the hexafluorophosphate is selected from a group consisting of hexafluorophosphate benzotriazol-1-yl-oxy-tris(dimethylamino)phosphonium hexafluorophosphate (BOP), benzotriazol-1-yl-oxytripyrrolidinophosphonium hexafluorophosphate (PyBOP), 2-(1H-7-azabenzotriazol-1-yl)-1,1,3,3-tetramethyl uronium hexafluorophosphate (HATU), and o-benzotriazole-N,N,N′,N′-tetramethyl-uronium-hexafluoro-phosphate (HBTU).

[0966] In some embodiments, Q comprises a nucleophilic reactive group (e.g. the amino group, thiol group, or hydroxyl group of the side chain of lysine, cysteine or serine) that is capable of conjugating to an electrophilic reactive group on Y or L. In some embodiments, Q comprises an electrophilic reactive group (e.g. the carboxylate group of the side chain of Asp or Glu) that is capable of conjugating to a nucleophilic reactive group on Y or L. In some embodiments, Q is chemically modified to comprise a reactive group that is capable of conjugating directly to Y or to L. In some embodiments, Q is modified at the C-terminal to comprise a natural or nonnatural amino acid with a nucleophilic side chain, such as an amino acid represented by Formula I, Formula II, or Formula III, as previously described herein (see Acylation and alkylation). In exemplary embodiments, the C-terminal amino acid of Q is selected from the group consisting of lysine, ornithine, serine, cysteine, and homocysteine. For example, the C-terminal amino acid of Q can be modified to comprise a lysine residue. In some embodiments, Q is modified at the C-terminal amino acid to comprise a natural or nonnatural amino acid with an electrophilic side chain such as, for example, Asp and Glu. In some embodiments, an internal amino acid of Q is substituted with a natural or nonnatural amino acid having a nucleophilic side chain, such as an amino acid represented by Formula I, Formula II, or Formula III, as previously described herein (see Acylation and alkylation). In exemplary embodiments, the internal amino acid of Q that is substituted is selected from the group consisting of lysine, ornithine, serine, cysteine, and homocysteine. For example, an internal amino acid of Q can be substituted with a lysine residue. In some embodiments, an internal amino acid of Q is substituted with a natural or nonnatural amino acid with an electrophilic side chain, such as, for example, Asp and Glu.

[0967] In some embodiments, Y comprises a reactive group that is capable of conjugating directly to Q or to L. In some embodiments, Y comprises a nucleophilic reactive group (e.g. amine, thiol, hydroxyl) that is capable of conjugating to an electrophilic reactive group on Q or L. In some embodiments, Y comprises electrophilic reactive group (e.g. carboxyl group, activated form of a carboxyl group, compound with a leaving group) that is capable of conjugating to a nucleophilic reactive group on Q or L. In some embodiments, Y is chemically modified to comprise either a nucleophilic reactive group that is capable of conjugating to an electrophilic reactive group on Q or L. In some embodiments, Y is chemically modified to comprise an electrophilic reactive group that is capable of conjugating to a nucleophilic reactive group on Q or L.

[0968] In some embodiments, conjugation can be carried out through organosilanes, e,g, aminosilane treated with glutaraldehyde; carbonyldiimidazole (CDI) activation of silanol groups; or utilization of dendrimers. A variety of dendrimers are known in the art and include poly (amidoamine) (PAMAM) dendrimers, which are synthesized by the divergent method starting from ammonia or ethylenediamine initiator core reagents; a sub-class of PAMAM dendrimers based on a tris-aminoethylene-imine core; radially layered poly(amidoamine-organosilicon) dendrimers (PAMAMOS), which are inverted unimolecular micelles that consist of hydrophilic, nucleophilic polyamidoamine (PAMAM) interiors and hydrophobic organosilicon (OS) exteriors; Poly (Propylene Imine) (PPI) dendrimers, which are generally poly-alkyl amines having primary amines as end groups, while the dendrimer interior consists of numerous of tertiary tris-propylene amines; Poly (Propylene Amine) (POPAM) dendrimers; Diaminobutane (DAB) dendrimers; amphiphilic dendrimers; micellar dendrimers which are unimolecular micelles of water soluble hyper branched polyphenylenes; polylysine dendrimers; and dendrimers based on poly-benzyl ether hyper branched skeleton.

[0969] In some embodiments, conjugation can be carried out through olefin metathesis. In some embodiments, Y and Q, Y and L, or Q and L both comprise an alkene or alkyne moiety that is capable of undergoing metathesis. In some embodiments a suitable catalyst (e.g. copper, ruthenium) is used to accelerate the metathesis reaction. Suitable methods of performing olefin metathesis reactions are described in the art. See, for example, Schafineister et al., J. Am. Chem. Soc. 122: 5891-5892 (2000), Walensky et al., Science 305: 1466-1470 (2004), and Blackwell et al., Angew, Chem., Int. Ed. 37: 3281-3284 (1998).

[0970] In some embodiments, conjugation can be carried out using click chemistry. A “click reaction” is wide in scope and easy to perform, uses only readily available reagents, and is insensitive to oxygen and water. In some embodiments, the click reaction is a cycloaddition reaction between an alkynyl group and an azido group to form a triazolyl group. In some embodiments, the click reaction uses a copper or ruthenium catalyst. Suitable methods of performing click reactions are described in the art. See, for example, Kolb et al., Drug Discovery Today 8:1128 (2003); Kolb et al., Angew. Chem. Int. Ed. 40:2004 (2001); Rostovtsev et al., Angew. Chem. Int. Ed. 41:2596 (2002); Tornoe et al., J. Org. Chem. 67:3057 (2002); Manetsch et al., J. Am. Chem. Soc. 126:12809 (2004); Lewis et al., Angew. Chem. Int. Ed. 41:1053 (2002); Speers, J. Am. Chem. Soc. 125:4686 (2003); Chan et al. Org. Lett. 6:2853 (2004); Zhang et al., J. Am. Chem. Soc. 127:15998 (2005); and Waser et al., J. Am. Chem. Soc. 127:8294 (2005).

[0971] Indirect conjugation via high affinity specific binding partners, e.g. streptavidin/biotin or avidin/biotin or lectin/carbohydrate is also contemplated.

Chemical Modification of Q and/or Y

[0972] In some embodiments, Q and/or Y are functionalized to comprise a nucleophilic reactive group or an electrophilic reactive group with an organic derivatizing agent. This derivatizing agent is capable of reacting with selected side chains or the N- or C-terminal residues of targeted amino acids on Q and functional groups on Y. Reactive groups on Q and/or Y include, e.g., aldehyde, amino, ester, thiol, α-haloacetyl, maleimido or hydrazino group. Derivatizing agents include, for example, maleimidobenzoyl sulfosuccinimide ester (conjugation through cysteine residues), N-hydroxysuccinimide (through lysine residues), glutaraldehyde, succinic anhydride or other agents known in the art. Alternatively, Q and/or Y can be linked to each other indirectly through intermediate carriers, such as polysaccharide or polypeptide carriers. Examples of polysaccharide carriers include aminodextran. Examples of suitable polypeptide carriers include polylysine, polyglutamic acid, polyaspartic acid, co-polymers thereof, and mixed polymers of these amino acids and others, e.g., serines, to confer desirable solubility properties on the resultant loaded carrier.

[0973] Cysteinyl residues most commonly are reacted with α-haloacetates (and corresponding amines), such as chloroacetic acid or chloroacetamide, to give carboxymethyl or carboxyamidomethyl derivatives. Cysteinyl residues also are derivatized by reaction with bromotrifluoroacetone, alpha-bromo-β-(5-imidozoyl)propionic acid, chloroacetyl phosphate, N-alkylmaleimides, 3-nitro-2-pyridyl disulfide, methyl 2-pyridyl disulfide, p-chloromercuribenzoate, 2-chloromercuri-4-nitrophenol, or chloro-7-nitrobenzo-2-oxa-1,3-diazole.

[0974] Histidyl residues are derivatized by reaction with diethylpyrocarbonate at pH 5.5-7.0 because this agent is relatively specific for the histidyl side chain. Para-bromophenacyl bromide also is useful; the reaction is preferably performed in 0.1 M sodium cacodylate at pH 6.0.

[0975] Lysinyl and amino-terminal residues are reacted with succinic or other carboxylic acid anhydrides. Derivatization with these agents has the effect of reversing the charge of the lysinyl residues. Other suitable reagents for derivatizing alpha-amino-containing residues include imidoesters such as methyl picolinimidate, pyridoxal phosphate, pyridoxal, chloroborohydride, trinitrobenzenesulfonic acid, O-methylisourea, 2,4-pentanedione, and transaminase-catalyzed reaction with glyoxylate.

[0976] Arginyl residues are modified by reaction with one or several conventional reagents, among them phenylglyoxal, 2,3-butanedione, 1,2-cyclohexanedione, and ninhydrin. Derivatization of arginine residues requires that the reaction be performed in alkaline conditions because of the high pKa of the guanidine functional group. Furthermore, these reagents may react with the groups of lysine as well as the arginine epsilon-amino group.

[0977] The specific modification of tyrosyl residues may be made, with particular interest in introducing spectral labels into tyrosyl residues by reaction with aromatic diazonium compounds or tetranitromethane. Most commonly, N-acetylimidizole and tetranitromethane are used to form O-acetyl tyrosyl species and 3-nitro derivatives, respectively.

[0978] Carboxyl side groups (aspartyl or glutamyl) are selectively modified by reaction with carbodiimides (R—N═C═N—R′), where R and R′ are different alkyl groups, such as 1-cyclohexyl-3-(2-morpholinyl-4-ethyl) carbodiimide or 1-ethyl-3-(4-azonia-4,4-dimethylpentyl) carbodiimide. Furthermore, aspartyl and glutamyl residues are converted to asparaginyl and glutaminyl residues by reaction with ammonium ions.

[0979] Other modifications include hydroxylation of proline and lysine, phosphorylation of hydroxyl groups of seryl or threonyl residues, methylation of the alpha-amino groups of lysine, arginine, and histidine side chains (T. E. Creighton, Proteins: Structure and Molecular Properties, W.H. Freeman & Co., San Francisco, pp. 79-86 (1983)), deamidation of asparagine or glutamine, acetylation of the N-terminal amine, and/or amidation or esterification of the C-terminal carboxylic acid group.

[0980] Another type of covalent modification involves chemically or enzymatically coupling glycosides to the peptide. Sugar(s) may be attached to (a) arginine and histidine, (b) free carboxyl groups, (c) free sulfhydryl groups such as those of cysteine, (d) free hydroxyl groups such as those of serine, threonine, or hydroxyproline, (e) aromatic residues such as those of tyrosine, or tryptophan, or (f) the amide group of glutamine. These methods are described in WO87/05330 published 11 Sep. 1987, and in Aplin and Wriston, CRC Crit. Rev. Biochem., pp. 259-306 (1981).

### Structure of L

[0981] In some embodiments, L is a bond. In these embodiments, Q and Y are conjugated together by reacting a nucleophilic reactive moiety on Q with and electrophilic reactive moiety on Y. In alternative embodiments, Q and Y are conjugated together by reacting an electrophilic reactive moiety on Q with a nucleophilic moiety on Y. In exemplary embodiments, L is an amide bond that forms upon reaction of an amine on Q (e.g. an ε-amine of a lysine residue) with a carboxyl group on Y. In alternative embodiments, Q and or Y are derivatized with a derivatizing agent before conjugation.

[0982] In some embodiments, L is a linking group. In some embodiments, L is a bifunctional linker and comprises only two reactive groups before conjugation to Q and Y. In embodiments where both Q and Y have electrophilic reactive groups, L comprises two of the same or two different nucleophilic groups (e.g. amine, hydroxyl, thiol) before conjugation to Q and Y. In embodiments where both Q and Y have nucleophilic reactive groups, L comprises two of the same or two different electrophilic groups (e.g. carboxyl group, activated form of a carboxyl group, compound with a leaving group) before conjugation to Q and Y. In embodiments where one of Q or Y has a nucleophilic reactive group and the other of Q or Y has an electrophilic reactive group, L comprises one nucleophilic reactive group and one electrophilic group before conjugation to Q and Y.

[0983] L can be any molecule with at least two reactive groups (before conjugation to Q and Y) capable of reacting with each of Q and Y. In some embodiments L has only two reactive groups and is bifunctional. L (before conjugation to the peptides) can be represented by Formula VI:

[chemical structure]

wherein A and B are independently nucleophilic or electrophilic reactive groups. In some embodiments A and B are either both nucleophilic groups or both electrophilic groups. In some embodiments one of A or B is a nucleophilic group and the other of A or B is an electrophilic group. Nonlimiting combinations of A and B are shown below.

| Both Nucleophilic | | Both Electrophilic | | Nucleophilic/Electrophilic | |
|---|---|---|---|---|---|
| A | B | A | B | A | B |
| amino | Amino | carboxyl | carboxyl | amino | carboxyl |
| amino | Thiol | carboxyl | acyl chloride | amino | acyl chloride |
| amino | hydroxyl | carboxyl | anhydride | amino | anhydride |
| thiol | Amino | carboxyl | Ester | amino | ester |
| thiol | Thiol | carboxyl | NHS | amino | NHS |
| thiol | hydroxyl | carboxyl | Halogen | amino | halogen |
| hydroxyl | Amino | carboxyl | sulfonate ester | amino | sulfonate ester |
| hydroxyl | Thiol | carboxyl | maleimido | amino | maleimido |
| hydroxyl | hydroxyl | carboxyl | haloacetyl | amino | haloacetyl |
| | | carboxyl | isocyanate | amino | isocyanate |
| | | acyl chloride | carboxyl | thiol | carboxyl |
| | | acyl chloride | acyl chloride | thiol | acyl chloride |
| | | acyl chloride | anhydride | thiol | anhydride |
| | | acyl chloride | Ester | thiol | ester |
| | | acyl chloride | NHS | thiol | NHS |
| | | acyl chloride | Halogen | thiol | halogen |
| | | acyl chloride | sulfonate ester | thiol | sulfonate ester |
| | | acyl chloride | maleimido | thiol | maleimido |
| | | acyl chloride | haloacetyl | thiol | haloacetyl |
| | | acyl chloride | isocyanate | thiol | isocyanate |
| | | anhydride | carboxyl | hydroxyl | carboxyl |
| | | anhydride | acyl chloride | hydroxyl | acyl chloride |
| | | anhydride | anhydride | hydroxyl | anhydride |
| | | anhydride | Ester | hydroxyl | ester |
| | | anhydride | NHS | hydroxyl | NHS |
| | | anhydride | Halogen | hydroxyl | halogen |
| | | anhydride | sulfonate ester | hydroxyl | sulfonate ester |
| | | anhydride | maleimido | hydroxyl | maleimido |
| | | anhydride | haloacetyl | hydroxyl | haloacetyl |
| | | anhydride | isocyanate | hydroxyl | isocyanate |
| | | ester | carboxyl | | |
| | | ester | acyl chloride | | |
| | | ester | anhydride | | |
| | | ester | Ester | | |
| | | ester | NHS | | |
| | | ester | Halogen | | |
| | | ester | sulfonate ester | | |
| | | ester | maleimido | | |
| | | ester | haloacetyl | | |
| | | ester | isocyanate | | |
| | | NHS | carboxyl | | |
| | | NHS | acyl chloride | | |
| | | NHS | anhydride | | |
| | | NHS | Ester | | |
| | | NHS | NHS | | |
| | | NHS | Halogen | | |
| | | NHS | sulfonate ester | | |
| | | NHS | maleimido | | |
| | | NHS | haloacetyl | | |
| | | NHS | isocyanate | | |
| | | halogen | carboxyl | | |
| | | halogen | acyl chloride | | |
| | | halogen | anhydride | | |
| | | halogen | Ester | | |
| | | halogen | NHS | | |
| | | halogen | Halogen | | |
| | | halogen | sulfonate ester | | |
| | | halogen | maleimido | | |
| | | halogen | haloacetyl | | |
| | | halogen | isocyanate | | |
| | | sulfonate ester | carboxyl | | |
| | | sulfonate ester | acyl chloride | | |
| | | sulfonate ester | anhydride | | |
| | | sulfonate ester | Ester | | |
| | | sulfonate ester | NHS | | |
| | | sulfonate ester | Halogen | | |
| | | sulfonate ester | sulfonate ester | | |
| | | sulfonate ester | maleimido | | |
| | | sulfonate ester | haloacetyl | | |
| | | sulfonate ester | isocyanate | | |
| | | maleimido | carboxyl | | |
| | | maleimido | acyl chloride | | |
| | | maleimido | anhydride | | |
| | | maleimido | Ester | | |
| | | maleimido | NHS | | |
| | | maleimido | Halogen | | |
| | | maleimido | sulfonate ester | | |
| | | maleimido | maleimido | | |
| | | maleimido | haloacetyl | | |
| | | maleimido | isocyanate | | |
| | | haloacetyl | carboxyl | | |
| | | haloacetyl | acyl chloride | | |
| | | haloacetyl | anhydride | | |
| | | haloacetyl | Ester | | |
| | | haloacetyl | NHS | | |
| | | haloacetyl | Halogen | | |
| | | haloacetyl | sulfonate ester | | |
| | | haloacetyl | maleimido | | |
| | | haloacetyl | haloacetyl | | |
| | | haloacetyl | isocyanate | | |
| | | isocyanate | carboxyl | | |
| | | isocyanate | acyl chloride | | |
| | | isocyanate | anhydride | | |
| | | isocyanate | Ester | | |
| | | isocyanate | NHS | | |
| | | isocyanate | Halogen | | |
| | | isocyanate | sulfonate ester | | |
| | | isocyanate | maleimido | | |
| | | isocyanate | haloacetyl | | |
| | | isocyanate | isocyanate | | |

In some embodiments, A and B may include alkene and/or alkyne functional groups that are suitable for olefin metathesis reactions. In some embodiments, A and B include moieties that are suitable for click chemistry (e.g. alkene, alkynes, nitriles, azides). Other nonlimiting examples of reactive groups (A and B) include pyridyldithiol, aryl azide, diazirine, carbodiimide, and hydrazide.

[0984] In some embodiments, L is hydrophobic. Hydrophobic linkers are known in the art. See, e.g., Bioconjugate Techniques, G. T. Hermanson (Academic Press, San Diego, Calif., 1996), which is incorporated by reference in its entirety. Suitable hydrophobic linking groups known in the art include, for example, 8-hydroxyoctanoic acid and 8-mercaptooctanoic acid. Before conjugation to the peptides of the composition, the hydrophobic linking group comprises at least two reactive groups (A and B), as described herein and as shown below:

[chemical structure]

[0985] In some embodiments, the hydrophobic linking group comprises either a maleimido or an iodoacetyl group and either a carboxylic acid or an activated carboxylic acid (e.g. NHS ester) as the reactive groups. In these embodiments, the maleimido or iodoacetyl group can be coupled to a thiol moiety on Q or Y and the carboxylic acid or activated carboxylic acid can be coupled to an amine on Q or Y with or without the use of a coupling reagent. Any coupling agent known to one skilled in the art can be used to couple the carboxylic acid with the free amine such as, for example, DCC, DIC, HATU, HBTU, TBTU, and other activating agents described herein. In specific embodiments, the hydrophilic linking group comprises an aliphatic chain of 2 to 100 methylene groups wherein A and B are carboxyl groups or derivatives thereof (e.g. succinic acid). In other specific embodiments the L is iodoacetic acid.

[chemical structure]

[0986] In some embodiments, the linking group is hydrophilic such as, for example, polyalkylene glycol. Before conjugation to the peptides of the composition, the hydrophilic linking group comprises at least two reactive groups (A and B), as described herein and as shown below:

[chemical structure]

In specific embodiments, the linking group is polyethylene glycol (PEG). The PEG in certain embodiments has a molecular weight of about 100 Daltons to about 10,000 Daltons, e.g. about 500 Daltons to about 5000 Daltons. The PEG in some embodiments has a molecular weight of about 10,000 Daltons to about 40,000 Daltons.

[0987] In some embodiments, the hydrophilic linking group comprises either a maleimido or an iodoacetyl group and either a carboxylic acid or an activated carboxylic acid (e.g. NHS ester) as the reactive groups. In these embodiments, the maleimido or iodoacetyl group can be coupled to a thiol moiety on Q or Y and the carboxylic acid or activated carboxylic acid can be coupled to an amine on Q or Y with or without the use of a coupling reagent. Any appropriate coupling agent known to one skilled in the art can be used to couple the carboxylic acid with the amine such as, for example, DCC, DIC, HATU, HBTU, TBTU, and other activating agents described herein In some embodiments, the linking group is maleimido-PEG(20 kDa)-COOH, iodoacetyl-PEG(20 kDa)-COOH, maleimido-PEG(20 kDa)-NHS, or iodoacetyl-PEG(20 kDa)-NHS.

[0988] In some embodiments, the linking group is comprised of an amino acid, a dipeptide, a tripeptide, or a polypeptide, wherein the amino acid, dipeptide, tripeptide, or polypeptide comprises at least two activating groups, as described herein. In some embodiments, the linking group (L) comprises a moiety selected from the group consisting of: amino, ether, thioether, maleimido, disulfide, amide, ester, thioester, alkene, cycloalkene, alkyne, trizoyl, carbamate, carbonate, cathepsin B-cleavable, and hydrazone.

[0989] In some embodiments, L comprises a chain of atoms from 1 to about 60, or 1 to 30 atoms or longer, 2 to 5 atoms, 2 to 10 atoms, 5 to 10 atoms, or 10 to 20 atoms long. In some embodiments, the chain atoms are all carbon atoms. In some embodiments, the chain atoms in the backbone of the linker are selected from the group consisting of C, O, N, and S. Chain atoms and linkers may be selected according to their expected solubility (hydrophilicity) so as to provide a more soluble conjugate. In some embodiments, L provides a functional group that is subject to cleavage by an enzyme or other catalyst or hydrolytic conditions found in the target tissue or organ or cell. In some embodiments, the length of L is long enough to reduce the potential for steric hindrance.

### Stability of L In Vivo

[0990] In some embodiments, L is stable in vivo. In some embodiments, L is stable in blood serum for at least 5 minutes, e.g. less than 25%, 20%, 15%, 10% or 5% of the conjugate is cleaved when incubated in serum for a period of 5 minutes. In other embodiments, L is stable in blood serum for at least 10, or 20, or 25, or 30, or 60, or 90, or 120 minutes, or 3, 4, 5, 6, 7, 8, 9, 10, 12, 15, 18 or 24 hours. In these embodiments, L does not comprise a functional group that is capable of undergoing hydrolysis in vivo. In some exemplary embodiments, L is stable in blood serum for at least about 72 hours. Nonlimiting examples of functional groups that are not capable of undergoing significant hydrolysis in vivo include amides, ethers, and thioethers. For example, the following compound is not capable of undergoing significant hydrolysis in vivo:

[chemical structure]

[0991] In some embodiments, L is hydrolyzable in vivo. In these embodiments, L comprises a functional group that is capable of undergoing hydrolysis in vivo. Nonlimiting examples of functional groups that are capable of undergoing hydrolysis in vivo include esters, anhydrides, and thioesters. For example the following compound is capable of undergoing hydrolysis in vivo because it comprises an ester group:

[chemical structure]

[0992] In some exemplary embodiments L is labile and undergoes substantial hydrolysis within 3 hours in blood plasma at 37° C., with complete hydrolysis within 6 hours. In some exemplary embodiments, L is not labile.

[0993] In some embodiments, L is metastable in vivo. In these embodiments, L comprises a functional group that is capable of being chemically or enzymatically cleaved in vivo (e.g., an acid-labile, reduction-labile, or enzyme-labile functional group), optionally over a period of time. In these embodiments, L can comprise, for example, a hydrazone moiety, a disulfide moiety, or a cathepsin-cleavable moiety. When L is metastable, and without intending to be bound by any particular theory, the Q-L-Y conjugate is stable in an extracellular environment, e.g., stable in blood serum for the time periods described above, but labile in the intracellular environment or conditions that mimic the intracellular environment, so that it cleaves upon entry into a cell. In some embodiments when L is metastable, L is stable in blood serum for at least about 24, 25, 26, 27, 28, 29, 30, 31, 32, 33, 34, 35, 36, 42, or 48 hours, for example, at least about 48, 54, 60, 66, or 72 hours, or about 24-48, 48-72, 24-60, 36-48, 36-72, or 48-72 hours.

### Q-L-Y Conjugates

### Conjugation of Q and Y

[0994] Conjugation of Q to Y through L can be carried out an any position within Q, including any of positions 1-29, a position within a C-terminal extension, or the C-terminal amino acid, provided that the activity of Q is retained, if not enhanced. Nonlimiting examples include positions 5, 7, 10, 11, 12, 13, 14, 15, 16, 17, 18, 19, 20, 21, 24, 27, 28, 29, 30, 37, 38, 39, 40, 41, 42, or 43 (according to the number of the amino acids of SEQ ID NO: 1601). In some embodiments, Y is conjugated to Q through L at one or more of positions 10, 20, 24, 30, 37, 38, 39, 40, 41, 32, or 43. In specific embodiments, Y is conjugated to Q through L at position 10 and/or 40 of Q.

### Activity

### Activity at the Glucagon Receptor and the Glucocorticoid Receptor

[0995] In some embodiments, Q-L-Y exhibits activity at both the glucagon receptor and a glucocorticoid receptor. In some embodiments, the activity (e.g., the EC₅₀ or the relative activity or potency) of Q at the glucagon receptor is within about 2000-fold, about 1000-fold, about 100-fold, about 75-fold, about 60-fold, about 50-fold, about 40-fold, about 30-fold, about 20-fold, about 10-fold, or about 5 fold different (higher or lower) from the activity (e.g., the EC₅₀ or the relative activity or potency) of Y at a glucocorticoid receptor. In some embodiments, the glucagon potency of Q is within about 25-, about 20-, about 15-, about 10-, or about 5-fold different (higher or lower) from the potency of Y.

[0996] In some embodiments, the ratio of the relative activity or the EC₅₀ or the potency of the Q at the glucagon receptor divided by the relative activity or the EC₅₀ or potency of Y at a glucocorticoid receptor is less than, or is about, X, wherein X is selected from 100, 75, 60, 50, 40, 30, 20, 15, 10, or 5. In some embodiments, the ratio of the EC₅₀ or potency or relative activity of Q at the glucagon receptor divided by the EC₅₀ or potency or relative activity of Y at a glucocorticoid receptor is about 1 less than 5 (e.g., about 4, about 3, about 2, about 1). In some embodiments, the ratio of the glucagon potency of Q compared to the glucocorticoid potency of Y is less than, or is about, Z, wherein Z is selected from 100, 75, 60, 50, 40, 30, 20, 15, 10, and 5. In some embodiments, the ratio of the glucagon potency of Q compared to the glucocorticoid potency Y is less than 5 (e.g., about 4, about 3, about 2, about 1). In some embodiments, Q has an EC₅₀ at the glucagon receptor which is 2- to 10-fold (e.g., 2-fold, 3-fold, 4-fold, 5-fold, 6-fold, 7-fold, 8-fold, 9-fold, 10-fold) greater than the EC₅₀ of Y at a glucocorticoid receptor.

[0997] In some embodiments, the ratio of the relative activity or potency or the EC₅₀ of Y at a glucocorticoid receptor divided by the relative activity or potency or the EC₅₀ of Q at the glucagon receptor is less than, or is about, V, wherein V is selected from 100, 75, 60, 50, 40, 30, 20, 15, 10, or 5. In some embodiments, the ratio of the EC₅₀ or potency or relative activity of Y at a glucocorticoid receptor divided by the EC₅₀ or potency or relative activity of Q at the glucagon receptor is less than 5 (e.g., about 4, about 3, about 2, about 1). In some embodiments, the ratio of the glucocorticoid potency of Y compared to the glucagon potency of Q is less than, or is about, W, wherein W is selected from 100, 75, 60, 50, 40, 30, 20, 15, 10, and 5. In some embodiments, the ratio of the glucocorticoid potency of Y compared to the glucagon potency of Q is less than 5 (e.g., about 4, about 3, about 2, about 1). In some embodiments, Y has an EC₅₀ at a glucocorticoid receptor which is about 2- to about 10-fold (e.g., 2-fold, 3-fold, 4-fold, 5-fold, 6-fold, 7-fold, 8-fold, 9-fold, 10-fold) greater than the EC₅₀ of Q at the glucagon receptor.

[0998] In some embodiments, Y exhibits at least 0.001%, at least 0.01%, at least 0.1% (e.g., about 0.5% or more, about 1% or more, about 5% or more, about 10% or more, or more) of the activity of endogenous ligand at a glucocorticoid receptor (glucocorticoid potency) and Q exhibits at least 0.1% (e.g., about 0.5% or more, about 1% or more, about 5% or more, about 10% or more, or more) of the activity of native glucagon at the glucagon receptor (glucagon potency).

### Activity at the GLP-1 Receptor and the Glucocorticoid Receptor

[0999] In some embodiments, Q-L-Y exhibits activity at both the GLP-1 receptor and a glucocorticoid receptor. In some embodiments, the activity (e.g., the EC₅₀ or the relative activity or potency) of Q at the GLP-1 receptor is within about 2000-fold, about 1000-fold, about 100-fold, about 75-fold, about 60-fold, about 50-fold, about 40-fold, about 30-fold, about 20-fold, about 10-fold, or about 5 fold different (higher or lower) from the activity (e.g., the EC₅₀ or the relative activity or potency) of Y at a nuclear horomone receptor. In some embodiments, the GLP-1 potency of Q is within about 25-, about 20-, about 15-, about 10-, or about 5-fold different (higher or lower) from the potency of Y.

[1000] In some embodiments, the ratio of the relative activity or the EC₅₀ or the potency of the Q at the GLP-1 receptor divided by the relative activity or the EC₅₀ or potency of Y at a glucocorticoid receptor is less than, or is about, X, wherein X is selected from 100, 75, 60, 50, 40, 30, 20, 15, 10, or 5. In some embodiments, the ratio of the EC₅₀ or potency or relative activity of Q at the GLP-1 receptor divided by the EC₅₀ or potency or relative activity of Y at a glucocorticoid receptor is about 1 less than 5 (e.g., about 4, about 3, about 2, about 1). In some embodiments, the ratio of the GLP-1 potency of Q compared to the glucocorticoid potency of Y is less than, or is about, Z, wherein Z is selected from 100, 75, 60, 50, 40, 30, 20, 15, 10, and 5. In some embodiments, the ratio of the GLP-1 potency of Q compared to the glucocorticoid potency Y is less than 5 (e.g., about 4, about 3, about 2, about 1). In some embodiments, Q has an EC₅₀ at the GLP-1 receptor which is 2- to 10-fold (e.g., 2-fold, 3-fold, 4-fold, 5-fold, 6-fold, 7-fold, 8-fold, 9-fold, 10-fold) greater than the EC₅₀ of Y at a glucocorticoid receptor.

[1001] In some embodiments, the ratio of the relative activity or potency or the EC₅₀ of Y at a glucocorticoid receptor divided by the relative activity or potency or the EC₅₀ of Q at the GLP-1 receptor is less than, or is about, V, wherein V is selected from 100, 75, 60, 50, 40, 30, 20, 15, 10, or 5. In some embodiments, the ratio of the EC₅₀ or potency or relative activity of Y at a glucocorticoid receptor divided by the EC₅₀ or potency or relative activity of Q at the GLP-1 receptor is less than 5 (e.g., about 4, about 3, about 2, about 1). In some embodiments, the ratio of the glucocorticoid potency of Y compared to the GLP-1 potency of Q is less than, or is about, W, wherein W is selected from 100, 75, 60, 50, 40, 30, 20, 15, 10, and 5. In some embodiments, the ratio of the glucocorticoid potency of Y compared to the GLP-1 potency of Q is less than 5 (e.g., about 4, about 3, about 2, about 1). In some embodiments, Y has an EC₅₀ at a glucocorticoid receptor which is about 2- to about 10-fold (e.g., 2-fold, 3-fold, 4-fold, 5-fold, 6-fold, 7-fold, 8-fold, 9-fold, 10-fold) greater than the EC₅₀ of Q at the GLP-1 receptor.

[1002] In some embodiments, Y exhibits at least 0.001%, at least 0.01%, at least 0.1% (e.g., about 0.5% or more, about 1% or more, about 5% or more, about 10% or more, or more) of the activity of endogenous ligand at a glucocorticoid receptor (glucocorticoid potency) and Q exhibits at least 0.1% (e.g., about 0.5% or more, about 1% or more, about 5% or more, about 10% or more, or more) of the activity of native GLP-1 at the GLP-1 receptor (GLP-1 potency).

### Activity at the GIP Receptor and the Glucocorticoid Receptor

[1003] In some embodiments, Q-L-Y exhibits activity at both the GIP receptor and a glucocorticoid receptor. In some embodiments, the activity (e.g., the EC₅₀ or the relative activity or potency) of Q at the GIP receptor is within about 2000-fold, about 1000-fold, about 100-fold, about 75-fold, about 60-fold, about 50-fold, about 40-fold, about 30-fold, about 20-fold, about 10-fold, or about 5 fold different (higher or lower) from the activity (e.g., the EC₅₀ or the relative activity or potency) of Y at a nuclear horomone receptor. In some embodiments, the GIP potency of Q is within about 25-, about 20-, about 15-, about 10-, or about 5-fold different (higher or lower) from the potency of Y.

[1004] In some embodiments, the ratio of the relative activity or the EC₅₀ or the potency of the Q at the GIP receptor divided by the relative activity or the EC₅₀ or potency of Y at a glucocorticoid receptor is less than, or is about, X, wherein X is selected from 100, 75, 60, 50, 40, 30, 20, 15, 10, or 5. In some embodiments, the ratio of the EC₅₀ or potency or relative activity of Q at the GIP receptor divided by the EC₅₀ or potency or relative activity of Y at a glucocorticoid receptor is about 1 less than 5 (e.g., about 4, about 3, about 2, about 1). In some embodiments, the ratio of the GIP potency of Q compared to the glucocorticoid potency of Y is less than, or is about, Z, wherein Z is selected from 100, 75, 60, 50, 40, 30, 20, 15, 10, and 5. In some embodiments, the ratio of the GIP potency of Q compared to the glucocorticoid potency Y is less than 5 (e.g., about 4, about 3, about 2, about 1). In some embodiments, Q has an EC₅₀ at the GIP receptor which is 2- to 10-fold (e.g., 2-fold, 3-fold, 4-fold, 5-fold, 6-fold, 7-fold, 8-fold, 9-fold, 10-fold) greater than the EC₅₀ of Y at a glucocorticoid receptor.

[1005] In some embodiments, the ratio of the relative activity or potency or the EC₅₀ of Y at a glucocorticoid receptor divided by the relative activity or potency or the EC₅₀ of Q at the GIP receptor is less than, or is about, V, wherein V is selected from 100, 75, 60, 50, 40, 30, 20, 15, 10, or 5. In some embodiments, the ratio of the EC₅₀ or potency or relative activity of Y at a glucocorticoid receptor divided by the EC₅₀ or potency or relative activity of Q at the GIP receptor is less than 5 (e.g., about 4, about 3, about 2, about 1). In some embodiments, the ratio of the glucocorticoid potency of Y compared to the GIP potency of Q is less than, or is about, W, wherein W is selected from 100, 75, 60, 50, 40, 30, 20, 15, 10, and 5. In some embodiments, the ratio of the glucocorticoid potency of Y compared to the GIP potency of Q is less than 5 (e.g., about 4, about 3, about 2, about 1). In some embodiments, Y has an EC₅₀ at a glucocorticoid receptor which is about 2- to about 10-fold (e.g., 2-fold, 3-fold, 4-fold, 5-fold, 6-fold, 7-fold, 8-fold, 9-fold, 10-fold) greater than the EC₅₀ of Q at the GIP receptor.

[1006] In some embodiments, Y exhibits at least 0.001%, at least 0.01%, at least 0.1% (e.g., about 0.5% or more, about 1% or more, about 5% or more, about 10% or more, or more) of the activity of endogenous ligand at a glucocorticoid receptor (glucocorticoid potency) and Q exhibits at least 0.1% (e.g., about 0.5% or more, about 1% or more, about 5% or more, about 10% or more, or more) of the activity of native GIP at the GIP receptor (GIP potency).

### Prodrugs of Q-L-Y

[1007] In some aspects of the invention, prodrugs of Q-L-Y are provided wherein the prodrug comprises a dipeptide prodrug element (A-B) covalently linked to an active site of Q via an amide linkage, as disclosed in International Patent Application No. PCT US09/68745 (filed on Dec. 18, 2009), which is incorporated herein by reference in its entirety. Subsequent removal of the dipeptide under physiological conditions and in the absence of enzymatic activity, restores full activity to the Q-L-Y conjugate.

[1008] In some embodiments a prodrug of Q-L-Y is provided having the general structure of A-B-Q-L-Y. In these embodiments A is an amino acid or a hydroxy acid and B is an N-alkylated amino acid linked to Q through formation of an amide bond between a carboxyl of B (in A-B) and an amine of Q. Furthermore, in some embodiments, A, B, or the amino acid of Q to which A-B is linked, is a non-coded amino acid, and chemical cleavage of A-B from Q is at least about 90% complete within about 1 to about 720 hours in PBS under physiological conditions. In another embodiment, chemical cleavage of A-B from Q is at least about 50% complete within about 1 hour or about 1 week in PBS under physiological conditions.

[1009] In some embodiment the dipeptide prodrug element (A-B) comprises a compound having the general structure below:

[chemical structure]

[1010] wherein

[1011] R₁, R₂, R₄ and R₈ are independently selected from the group consisting of H, C₁-C₁₈ alkyl, C₂-C₁₈ alkenyl, (C₁-C₁₈ alkyl)OH, (C₁-C₁₈ alkyl)SH, (C₂-C₃ alkyl)SCH₃, (C₁-C₄ alkyl)CONH₂, (C₁-C₄ alkyl)COOH, (C₁-C₄ alkyl)NH₂, (C₁-C₄ alkyl)NHC(NH₂⁺)NH₂, (C₀-C₄ alkyl)(C₃-C₆ cycloalkyl), (C₀-C₄ alkyl)(C₂-C₅ heterocyclic), (C₀-C₄ alkyl)(C₆-C₁₀ aryl)R₇, (C₁-C₄ alkyl)(C₃-C₉ heteroaryl), and C₁-C₁₂ alkyl(W₁)C₁-C₁₂ alkyl, wherein W₁ is a heteroatom selected from the group consisting of N, S and O, or R₁ and R₂ together with the atoms to which they are attached form a C₃-C₁₂ cycloalkyl; or R₄ and R₈ together with the atoms to which they are attached form a C₃-C₆ cycloalkyl;

[1012] R₃ is selected from the group consisting of C₁-C₁₈ alkyl, (C₁-C₁₈ alkyl)OH, (C₁-C₁₈ alkyl)NH₂, (C₁-C₁₈ alkyl)SH, (C₀-C₄ alkyl)(C₃-C₆)cycloalkyl, (C₀-C₄ alkyl)(C₂-C₅ heterocyclic), (C₀-C₄ alkyl)(C₆-C₁₀ aryl)R₇, and (C₁-C₄ alkyl)(C₃-C₉ heteroaryl) or R₄ and R₃ together with the atoms to which they are attached form a 4, 5 or 6 member heterocyclic ring;

[1013] R₅ is NHR₆ or OH;

[1014] R₆ is H, C₁-C₈ alkyl or R₆ and R₁ together with the atoms to which they are attached form a 4, 5 or 6 member heterocyclic ring; and

[1015] R₇ is selected from the group consisting of hydrogen, C₁-C₁₈ alkyl, C₂-C₁₈ alkenyl, (C₀-C₄ alkyl)CONH₂, (C₀-C₄ alkyl)COOH, (C₀-C₄ alkyl)NH₂, (C₀-C₄ alkyl)OH, and halo.

[1016] In some embodiments, the dipeptide prodrug element is linked to the amino terminus of Q. In other embodiments, the dipeptide prodrug is linked to an internal amino acid of Q, as described in International Patent Application No. PCT US09/68745.

### Exemplary Embodiments of Q-L-Y

[1017] In some embodiments of the invention, the glucagon superfamily peptide conjugates can be represented by the following formula:

Q-L-Y

wherein Q is a glucagon superfamily peptide, Y is a GR ligand, and L is a linking group or a bond.

[1018] In specific aspects, Q comprises an amino acid sequence that is based on the amino acid sequence of native human GLP-1 (SEQ ID NO.: 1603). In some aspects, Q comprises a modified amino acid sequence of SEQ ID NO: 1603 comprising 1, 2, 3, 4, 5, 6, 7, 8, 9, 10, 11, 12, 13, 14, 15, and in some instances, 16 or more (e.g., 17, 18, 19, 20, 21, 22, 23, 24, 25, etc.), amino acid modifications and up to 1, up to 2, up to 3, up to 4, up to 5, up to 6, up to 7, up to 8, up to 9, or up to 10 amino acid modifications (e.g., acylation, alkylation, pegylation, truncation at C-terminus, substitution) relative to the native human GLP-1 sequence (SEQ ID NO: 1603). For example, Q can be GLP-1(Aib²E¹⁶Cex K⁴⁰) (SEQ ID NO.: 1647), GLP-1(Aib²A²²Cex K⁴⁰) (SEQ ID NO.: 1648), dGLP-1(A¹Aib²A²²Cex K⁴⁰) (SEQ ID NO.: 1649), GLP-1(Aib²E¹⁶C²⁴(PEG-40 kDa)Cex K⁴⁰) (SEQ ID NO.: 1650).

[1019] In specific aspects, Y is a steroid or a derivative thereof, and acts at an estrogen receptor, an androgen receptor, a glucocorticoid receptor, or a RAR-related orphan receptor. In some embodiments, Y comprises a structure that permits or promotes agonist activity at an estrogen receptor, an androgen receptor, a glucocorticoid receptor, or a RAR-related orphan receptor, while in other embodiments, Y is an antagonist of an an estrogen receptor, an androgen receptor, a glucocorticoid receptor, or a RAR-related orphan receptor. For example, Y can be estradiol, estrone, or cholesterol.

[1020] In specific aspects, Y acts at a glucocorticoid receptor. For example, Y can be cortisol, cortisone acetate, beclometasone, prednisone, prednisolone, methylprednisolone, betamethasone, trimcinolone, or dexamethasone.

[1021] In specific aspects, L is stable in vivo. In some embodiments, L comprises, for example, an amide, ether, carbamate, or thioether. In alternative aspects, L is hydrolyzable in vivo. In some embodiments, L comprises an ester, anhydride, or thioester. In other aspects, L is metastable in vivo. In some aspects, L is acid-labile (e.g., comprises hydrazone moiety), reduction-labile (e.g., comprises a disulfide moiety), or enzyme-lable (e.g., comprises a cathepsin B-cleavable moiety).

[1022] In some embodiments, Y is dexamethasone. In these embodiments, the structure of Q-L-Y can include:

[chemical structure]

wherein
B′ is an amino- or thiol-containing side chain of an amino acid of Q, wherein B′ is optionally the side chain of an amino acid corresponding to position 10, 20, 24, 30, 37, 38, 39, 40, 41, 42, or 43 of a sequence comprising native glucagon;
L is a bond,

[chemical structure]

and,
x is C₁-C₁₀ alkylene (e.g., C₁-C₆ alkylene), C₁-C₁₀ alkenylene, or C₁-C₁₀ alkynylene.

[1023] In some embodiments, B′ is

[chemical structure]

In some of these embodiments, z is C₁-C₆ alkylene For example, B′ can include the side chain of lysine, cysteine, homocysteine, or penicillamine.

[1024] In some embodiments, L is a bond. In other embodiments, L is

[chemical structure]

and x is C₁-C₅ alkylene. For example, L can include

[chemical structure]

[1025] In some embodiments, the structure of Q-L-Y can be, for example:

[chemical structure]

[1026] In some of these embodiments, x is C₁-C₄ alkylene. For example, the structure of Q-L-Y can include:

[chemical structure]

[1027] In some exemplary embodiments, the structure of Q-L-Y is:

[chemical structure]

[chemical structure]

[1028] In some embodiments where Y is dexamethasone, the structure of Q-L-Y can include:

[chemical structure]

wherein
B″ is a thiol-containing side chain of an amino acid of Q, wherein B″ is optionally the side chain of an amino acid corresponding to position 10, 20, 24, 30, 37, 38, 39, 40, 41, 42, or 43 of a sequence comprising native glucagon, and
y is C₁-C₁₀ alkylene (e.g., C₁₋₆), C₁-C₁₀ alkenylene, or C₁-C₁₀ alkynylene.

[1029] In some embodiments, B″ is

[chemical structure]

In some of these embodiments, z is C₁-C₆ alkylene For example, B″ can include the side chain of cysteine, homocysteine, or penicillamine

[1030] For example, the structure of Q-L-Y can be

[chemical structure]

[1031] In some exemplary embodiments, the structure of L-Y is:

[chemical structure]

[1032] Nonlimiting examples of GLP-1 based glucagon superfamily peptides conjugated to estradiol through a stable linkage are shown below (SEQ ID NOs.: 1651-1654, 1667).

[chemical structure]

[1033] Nonlimiting examples of GLP-1 based glucagon superfamily peptides conjugated to cholesterol through a stable linkage are shown below (SEQ ID NOs.: 1660-1661).

[chemical structure]

[1034] Nonlimiting examples of GLP-1 based glucagon superfamily peptides conjugated to estradiol or estrone through a hydrolyzable linkage are shown below (SEQ ID NOs.: 1655-1659, 1666).

[chemical structure]

[chemical structure]

[1035] Nonlimiting examples of GLP-1 based glucagon superfamily peptides conjugated to estradiol through an acid-labile linkage is shown below (SEQ ID NO.: 1662).

[chemical structure]

[1036] Nonlimiting examples of GLP-1 based glucagon superfamily peptides conjugated to estradiol through a reduction-labile linkage are shown below (SEQ ID NOs.: 1663-1664).

[chemical structure]

[1037] Nonlimiting examples of GLP-1 based glucagon superfamily peptides conjugated to estradiol through an enzyme-labile linkage are shown below (SEQ ID NOs.: 1665, 1668).

[chemical structure]

[1038] A nonlimiting example of a GLP-1 based glucagon superfamily peptide conjugated to dexamethasone through an acid-labile linkage is shown below (SEQ ID NO: 1669).

[chemical structure]

[1039] Nonlimiting examples of a GLP-1 based glucagon superfamily peptide conjugated to dexamethasone through a stable linkage is shown below (SEQ ID NOs: 1670 and 1671).

[chemical structure]

[1040] A nonlimiting example of a GLP-1 based glucagon superfamily peptide conjugated to dexamethasone through reduction-labile linkages are shown below (SEQ ID NOs: 1672, 1673, and 1674).

[chemical structure]

[1041] In some embodiments, any of SEQ ID NOs.: 1-760, 801-919, 1001-1275, 1301-1371, 1401-1518, 1601-1646 can be substituted for SEQ ID NOs.: 1647-1650 in the above exemplary embodiments.

[1042] Data herein confirms that conjugates comprising the glucagon superfamily peptides of the invention (Q) and estrogen (Y) have synergistic pharmacology. The Q portion of these conjugates can act to direct the estrogen portion of the conjugate to targets of desired action and away from classical gynecological tissues, to result in improved glycemic control and energy homeostasis, with a much enhanced therapeutic index.

[1043] Pancreatic β cell dysfunction is characterized by the loss of insulin biosynthesis and secretion in combination with a decrease in functional mass due to β cell apoptosis, which arises from chronic glucose & lipid oxidation (glucolipotoxicity) along with compensatory hyperfunction (ER stress). Because type 2 diabetes ensues upon β cell dysfunction, strategies aimed to protect insulin-producing β cells from apoptosis or to restore β cell functional mass represent a major opportunity for therapeutic intervention in the treatment of type 2 diabetes.

[1044] Estrogen possesses robust anti-apoptotic effects in rodent and human β cells, as well as other target tissues in the body. Estrogen's extra-pancreatic functions in the liver to suppress lipogenesis and restore insulin sensitivity can indirectly improve β cell function. It also has action at the hypothalamus to reduce food intake and increase energy expenditure. However, these estrogen effects can be deleterious in gynecological target tissues, as hormone replacement therapy has been shown to increase the incidence of breast cancer. Without intending to be bound by any particular theory, selectively directing estrogen action to β cells, liver, &/or hypothalamus can be beneficial.

[1045] The clinical application of estrogen has been limited due to the fear of its oncogenic potential and gynecological action. To enhance the therapeutic index of estrogen, the incretin-based conjugates of the invention permit preferential targeting of estrogen to desired tissues while minimizing action at breast and endometrial tissues. Data in the examples herein demonstrate that conjugates of glucagon superfamily peptides and estrogen have a synergistic, beneficial effect on glycemic control (e.g. as measured by decreased glucose levels) and energy homeostasis (e.g. as measured by decreased body weight and/or fat mass) by the combined insulinotropic and anabolic activities on pancreatic beta cells with an anorectic effect at the hypothalamus.

[1046] To explore the capacity of each individual component of the conjugate (e.g., the GLP-1 portion and estrogen portion) to regulate blood glucose and body weight, a set of peptide-estrogen conjugates were synthesized to possess full GLP-1 agonism with a range of less than 0.1% to more than 100% in vitro activity and with linker chemistries (stable, labile, and metastable) that enable differential estrogen release in plasma. The specific release of estrogen was determined to vary within a broad range from chemical forms that were stable to other forms that fully release estrogen in a few hours.

[1047] For example, in diet-induced obese mice, a fully active GLP-1 agonist with a stably-linked estrogen consistently proved to be more efficacious in reducing blood glucose and body weight than the comparative GLP-1 control. The stable estrogen-peptide conjugates proved to be devoid of classical estrogenic activity as assessed by the lack of uterotrophic activity in ovariectomized mice, whereas labile estrogen-peptide conjugates displayed trophic activity at the uterus. Chemical derivatives that knocked-out GLP-1 agonism and/or rendered the estrogen labile in plasma demonstrated lesser efficacy than the stable GLP-1/Estrogen conjugates, indicating the combined presence of GLP-1 and targeted estrogen can achieve superior reductions in glucose and body weight.

[1048] The “meta”-stable peptide-estrogen conjugates that were prepared are stable in plasma but capable of releasing estrogen upon cellular internalization. These glucagon superfamily peptide/estrogen conjugates with metastable linkages were able to lower glucose levels and body weight to a greater extent than conjugates with labile linkages, while lacking deleterious uterotrophic activity.

[1049] Glucagon superfamily peptides that are stably or metastably linked to estrogen consistently demonstrated an enhanced efficacy in reducing body weight, food intake, and fat mass in obese, non-diabetic mice when compared to an appropriate control. This enhanced efficacy is absent in conjugates where the estrogen is pharmacologically labile, and is not observed in conjugates where the glucagon superfamily peptide is purposefully inactive. The stable and metastable attachments of estrogen to glucagon superfamily peptides were differentially devoid of estrogenic activity relative to the labile conjugates and, in contrast to labile conjugates, did not display uterine growth. Collectively, these finding demonstrate enhanced efficacy derived from the stably- and metastably-linked glucagon superfamily peptide/estrogen conjugates of the invention in obese, metabolically compromised mice without evidence of the classical estrogenic effect that limit estrogen's medicinal use.

[1050] In exemplary embodiments, the conjugates are useful for treating any of the conditions described herein, including but not limited to a hyperglycemic medical condition, obesity, metabolic syndrome, and NAFLD.

### Pharmaceutical Compositions

### Salts

[1051] In some embodiments, the Q-L-Y conjugates described herein are in the form of a salt, e.g., a pharmaceutically acceptable salt. As used herein the term “pharmaceutically acceptable salt” refers to salts of compounds that retain the biological activity of the parent compound, and which are not biologically or otherwise undesirable. Such salts can be prepared in situ during the final isolation and purification of the conjugate, or separately prepared by reacting a free base function with a suitable acid. Many of the compounds disclosed herein are capable of forming acid and/or base salts by virtue of the presence of amino and/or carboxyl groups or groups similar thereto.

[1052] Pharmaceutically acceptable acid addition salts may be prepared from inorganic and organic acids. Representative acid addition salts include, but are not limited to acetate, adipate, alginate, citrate, aspartate, benzoate, benzenesulfonate, bisulfate, butyrate, camphorate, camphor sulfonate, digluconate, glycerophosphate, hemisulfate, heptanoate, hexanoate, fumarate, hydrochloride, hydrobromide, hydroiodide, 2-hydroxyethansulfonate (isothionate), lactate, maleate, methane sulfonate, nicotinate, 2-naphthalene sulfonate, oxalate, palmitoate, pectinate, persulfate, 3-phenylpropionate, picrate, pivalate, propionate, succinate, tartrate, thiocyanate, phosphate, glutamate, bicarbonate, p-toluenesulfonate, and undecanoate. Salts derived from inorganic acids include hydrochloric acid, hydrobromic acid, sulfuric acid, nitric acid, phosphoric acid, and the like. Salts derived from organic acids include acetic acid, propionic acid, glycolic acid, pyruvic acid, oxalic acid, malic acid, malonic acid, succinic acid, maleic acid, fumaric acid, tartaric acid, citric acid, benzoic acid, cinnamic acid, mandelic acid, methanesulfonic acid, ethanesulfonic acid, p-toluene-sulfonic acid, salicylic acid, and the like. Examples of acids which can be employed to form pharmaceutically acceptable acid addition salts include, for example, an inorganic acid, e.g., hydrochloric acid, hydrobromic acid, sulphuric acid, and phosphoric acid, and an organic acid, e.g., oxalic acid, maleic acid, succinic acid, and citric acid.

[1053] Basic addition salts also can be prepared in situ during the final isolation and purification of the source of salicylic acid, or by reacting a carboxylic acid-containing moiety with a suitable base such as the hydroxide, carbonate, or bicarbonate of a pharmaceutically acceptable metal cation or with ammonia or an organic primary, secondary, or tertiary amine. Pharmaceutically acceptable salts include, but are not limited to, cations based on alkali metals or alkaline earth metals such as lithium, sodium, potassium, calcium, magnesium, and aluminum salts, and the like, and nontoxic quaternary ammonia and amine cations including ammonium, tetramethylammonium, tetraethylammonium, methylammonium, dimethylammonium, trimethylammonium, triethylammonium, diethylammonium, and ethylammonium, amongst others. Other representative organic amines useful for the formation of base addition salts include, for example, ethylenediamine, ethanolamine, diethanolamine, piperidine, piperazine, and the like. Salts derived from organic bases include, but are not limited to, salts of primary, secondary and tertiary amines.

[1054] Further, basic nitrogen-containing groups can be quaternized with the conjugate of the present disclosure as lower alkyl halides such as methyl, ethyl, propyl, and butyl chlorides, bromides, and iodides; long chain halides such as decyl, lauryl, myristyl, and stearyl chlorides, bromides, and iodides; arylalkyl halides like benzyl and phenethyl bromides and others. Water or oil-soluble or dispersible products are thereby obtained.

### Formulations

[1055] In accordance with some embodiments, a pharmaceutical composition is provided wherein the composition comprises a Q-L-Y conjugate of the present disclosure, or pharmaceutically acceptable salt thereof, and a pharmaceutically acceptable carrier. The pharmaceutical composition can comprise any pharmaceutically acceptable ingredient, including, for example, acidifying agents, additives, adsorbents, aerosol propellants, air displacement agents, alkalizing agents, anticaking agents, anticoagulants, antimicrobial preservatives, antioxidants, antiseptics, bases, binders, buffering agents, chelating agents, coating agents, coloring agents, desiccants, detergents, diluents, disinfectants, disintegrants, dispersing agents, dissolution enhancing agents, dyes, emollients, emulsifying agents, emulsion stabilizers, fillers, film forming agents, flavor enhancers, flavoring agents, flow enhancers, gelling agents, granulating agents, humectants, lubricants, mucoadhesives, ointment bases, ointments, oleaginous vehicles, organic bases, pastille bases, pigments, plasticizers, polishing agents, preservatives, sequestering agents, skin penetrants, solubilizing agents, solvents, stabilizing agents, suppository bases, surface active agents, surfactants, suspending agents, sweetening agents, therapeutic agents, thickening agents, tonicity agents, toxicity agents, viscosity-increasing agents, water-absorbing agents, water-miscible cosolvents, water softeners, or wetting agents.

[1056] In some embodiments, the pharmaceutical composition comprises any one or a combination of the following components: acacia, acesulfame potassium, acetyltributyl citrate, acetyltriethyl citrate, agar, albumin, alcohol, dehydrated alcohol, denatured alcohol, dilute alcohol, aleuritic acid, alginic acid, aliphatic polyesters, alumina, aluminum hydroxide, aluminum stearate, amylopectin, α-amylose, ascorbic acid, ascorbyl palmitate, aspartame, bacteriostatic water for injection, bentonite, bentonite magma, benzalkonium chloride, benzethonium chloride, benzoic acid, benzyl alcohol, benzyl benzoate, bronopol, butylated hydroxyanisole, butylated hydroxytoluene, butylparaben, butylparaben sodium, calcium alginate, calcium ascorbate, calcium carbonate, calcium cyclamate, dibasic anhydrous calcium phosphate, dibasic dehydrate calcium phosphate, tribasic calcium phosphate, calcium propionate, calcium silicate, calcium sorbate, calcium stearate, calcium sulfate, calcium sulfate hemihydrate, canola oil, carbomer, carbon dioxide, carboxymethyl cellulose calcium, carboxymethyl cellulose sodium, β-carotene, carrageenan, castor oil, hydrogenated castor oil, cationic emulsifying wax, cellulose acetate, cellulose acetate phthalate, ethyl cellulose, microcrystalline cellulose, powdered cellulose, silicified microcrystalline cellulose, sodium carboxymethyl cellulose, cetostearyl alcohol, cetrimide, cetyl alcohol, chlorhexidine, chlorobutanol, chlorocresol, cholesterol, chlorhexidine acetate, chlorhexidine gluconate, chlorhexidine hydrochloride, chlorodifluoroethane (HCFC), chlorodifluoromethane, chlorofluorocarbons (CFC) chlorophenoxyethanol, chloroxylenol, corn syrup solids, anhydrous citric acid, citric acid monohydrate, cocoa butter, coloring agents, corn oil, cottonseed oil, cresol, m-cresol, o-cresol, p-cresol, croscarmellose sodium, crospovidone, cyclamic acid, cyclodextrins, dextrates, dextrin, dextrose, dextrose anhydrous, diazolidinyl urea, dibutyl phthalate, dibutyl sebacate, diethanolamine, diethyl phthalate, difluoroethane (HFC), dimethyl-β-cyclodextrin, cyclodextrin-type compounds such as Captisol®, dimethyl ether, dimethyl phthalate, dipotassium edentate, disodium edentate, disodium hydrogen phosphate, docusate calcium, docusate potassium, docusate sodium, dodecyl gallate, dodecyltrimethylammonium bromide, edentate calcium disodium, edtic acid, eglumine, ethyl alcohol, ethylcellulose, ethyl gallate, ethyl laurate, ethyl maltol, ethyl oleate, ethylparaben, ethylparaben potassium, ethylparaben sodium, ethyl vanillin, fructose, fructose liquid, fructose milled, fructose pyrogen-free, powdered fructose, fumaric acid, gelatin, glucose, liquid glucose, glyceride mixtures of saturated vegetable fatty acids, glycerin, glyceryl behenate, glyceryl monooleate, glyceryl monostearate, self-emulsifying glyceryl monostearate, glyceryl palmitostearate, glycine, glycols, glycofurol, guar gum, heptafluoropropane (HFC), hexadecyltrimethylammonium bromide, high fructose syrup, human serum albumin, hydrocarbons (HC), dilute hydrochloric acid, hydrogenated vegetable oil, type II, hydroxyethyl cellulose, 2-hydroxyethyl-β-cyclodextrin, hydroxypropyl cellulose, low-substituted hydroxypropyl cellulose, 2-hydroxypropyl-β-cyclodextrin, hydroxypropyl methylcellulose, hydroxypropyl methylcellulose phthalate, imidurea, indigo carmine, ion exchangers, iron oxides, isopropyl alcohol, isopropyl myristate, isopropyl palmitate, isotonic saline, kaolin, lactic acid, lactitol, lactose, lanolin, lanolin alcohols, anhydrous lanolin, lecithin, magnesium aluminum silicate, magnesium carbonate, normal magnesium carbonate, magnesium carbonate anhydrous, magnesium carbonate hydroxide, magnesium hydroxide, magnesium lauryl sulfate, magnesium oxide, magnesium silicate, magnesium stearate, magnesium trisilicate, magnesium trisilicate anhydrous, malic acid, malt, maltitol, maltitol solution, maltodextrin, maltol, maltose, mannitol, medium chain triglycerides, meglumine, menthol, methylcellulose, methyl methacrylate, methyl oleate, methylparaben, methylparaben potassium, methylparaben sodium, microcrystalline cellulose and carboxymethylcellulose sodium, mineral oil, light mineral oil, mineral oil and lanolin alcohols, oil, olive oil, monoethanolamine, montmorillonite, octyl gallate, oleic acid, palmitic acid, paraffin, peanut oil, petrolatum, petrolatum and lanolin alcohols, pharmaceutical glaze, phenol, liquified phenol, phenoxyethanol, phenoxypropanol, phenylethyl alcohol, phenylmercuric acetate, phenylmercuric borate, phenylmercuric nitrate, polacrilin, polacrilin potassium, poloxamer, polydextrose, polyethylene glycol, polyethylene oxide, polyacrylates, polyethylene-polyoxypropylene-block polymers, polymethacrylates, polyoxyethylene alkyl ethers, polyoxyethylene castor oil derivatives, polyoxyethylene sorbitol fatty acid esters, polyoxyethylene stearates, polyvinyl alcohol, polyvinyl pyrrolidone, potassium alginate, potassium benzoate, potassium bicarbonate, potassium bisulfite, potassium chloride, postassium citrate, potassium citrate anhydrous, potassium hydrogen phosphate, potassium metabisulfite, monobasic potassium phosphate, potassium propionate, potassium sorbate, povidone, propanol, propionic acid, propylene carbonate, propylene glycol, propylene glycol alginate, propyl gallate, propylparaben, propylparaben potassium, propylparaben sodium, protamine sulfate, rapeseed oil, Ringer's solution, saccharin, saccharin ammonium, saccharin calcium, saccharin sodium, safflower oil, saponite, serum proteins, sesame oil, colloidal silica, colloidal silicon dioxide, sodium alginate, sodium ascorbate, sodium benzoate, sodium bicarbonate, sodium bisulfite, sodium chloride, anhydrous sodium citrate, sodium citrate dehydrate, sodium chloride, sodium cyclamate, sodium edentate, sodium dodecyl sulfate, sodium lauryl sulfate, sodium metabisulfite, sodium phosphate, dibasic, sodium phosphate, monobasic, sodium phosphate, tribasic, anhydrous sodium propionate, sodium propionate, sodium sorbate, sodium starch glycolate, sodium stearyl fumarate, sodium sulfite, sorbic acid, sorbitan esters (sorbitan fatty esters), sorbitol, sorbitol solution 70%, soybean oil, spermaceti wax, starch, corn starch, potato starch, pregelatinized starch, sterilizable maize starch, stearic acid, purified stearic acid, stearyl alcohol, sucrose, sugars, compressible sugar, confectioner's sugar, sugar spheres, invert sugar, Sugartab, Sunset Yellow FCF, synthetic paraffin, talc, tartaric acid, tartrazine, tetrafluoroethane (HFC), theobroma oil, thimerosal, titanium dioxide, alpha tocopherol, tocopheryl acetate, alpha tocopheryl acid succinate, beta-tocopherol, delta-tocopherol, gamma-tocopherol, tragacanth, triacetin, tributyl citrate, triethanolamine, triethyl citrate, trimethyl-β-cyclodextrin, trimethyltetradecylammonium bromide, tris buffer, trisodium edentate, vanillin, type I hydrogenated vegetable oil, water, soft water, hard water, carbon dioxide-free water, pyrogen-free water, water for injection, sterile water for inhalation, sterile water for injection, sterile water for irrigation, waxes, anionic emulsifying wax, carnauba wax, cationic emulsifying wax, cetyl ester wax, microcrystalline wax, nonionic emulsifying wax, suppository wax, white wax, yellow wax, white petrolatum, wool fat, xanthan gum, xylitol, zein, zinc propionate, zinc salts, zinc stearate, or any excipient in the Handbook of Pharmaceutical Excipients, Third Edition, A. H. Kibbe (Pharmaceutical Press, London, UK, 2000), which is incorporated by reference in its entirety. Remington's Pharmaceutical Sciences, Sixteenth Edition, E. W. Martin (Mack Publishing Co., Easton, Pa., 1980), which is incorporated by reference in its entirety, discloses various components used in formulating pharmaceutically acceptable compositions and known techniques for the preparation thereof. Except insofar as any conventional agent is incompatible with the pharmaceutical compositions, its use in pharmaceutical compositions is contemplated. Supplementary active ingredients also can be incorporated into the compositions.

[1057] In some embodiments, the foregoing component(s) may be present in the pharmaceutical composition at any concentration, such as, for example, at least A, wherein A is 0.0001% w/v, 0.001% w/v, 0.01% w/v, 0.1% w/v, 1% w/v, 2% w/v, 5% w/v, 10% w/v, 20% w/v, 30% w/v, 40% w/v, 50% w/v, 60% w/v, 70% w/v, 80% w/v, or 90% w/v. In some embodiments, the foregoing component(s) may be present in the pharmaceutical composition at any concentration, such as, for example, at most B, wherein B is 90% w/v, 80% w/v, 70% w/v, 60% w/v, 50% w/v, 40% w/v, 30% w/v, 20% w/v, 10% w/v, 5% w/v, 2% w/v, 1% w/v, 0.1% w/v, 0.001% w/v, or 0.0001%. In other embodiments, the foregoing component(s) may be present in the pharmaceutical composition at any concentration range, such as, for example from about A to about B. In some embodiments, A is 0.0001% and B is 90%.

[1058] The pharmaceutical compositions may be formulated to achieve a physiologically compatible pH. In some embodiments, the pH of the pharmaceutical composition may be at least 5, at least 5.5, at least 6, at least 6.5, at least 7, at least 7.5, at least 8, at least 8.5, at least 9, at least 9.5, at least 10, or at least 10.5 up to and including pH 11, depending on the formulation and route of administration. In certain embodiments, the pharmaceutical compositions may comprise buffering agents to achieve a physiological compatible pH. The buffering agents may include any compounds capabale of buffering at the desired pH such as, for example, phosphate buffers (e.g., PBS), triethanolamine, Tris, bicine, TAPS, tricine, HEPES, TES, MOPS, PIPES, cacodylate, MES, and others. In certain embodiments, the strength of the buffer is at least 0.5 mM, at least 1 mM, at least 5 mM, at least 10 mM, at least 20 mM, at least 30 mM, at least 40 mM, at least 50 mM, at least 60 mM, at least 70 mM, at least 80 mM, at least 90 mM, at least 100 mM, at least 120 mM, at least 150 mM, or at least 200 mM. In some embodiments, the strength of the buffer is no more than 300 mM (e.g., at most 200 mM, at most 100 mM, at most 90 mM, at most 80 mM, at most 70 mM, at most 60 mM, at most 50 mM, at most 40 mM, at most 30 mM, at most 20 mM, at most 10 mM, at most 5 mM, at most 1 mM).

### Routes of Administration

[1059] The following discussion on routes of administration is merely provided to illustrate exemplary embodiments and should not be construed as limiting the scope in any way.

[1060] Formulations suitable for oral administration can consist of (a) liquid solutions, such as an effective amount of the conjugate of the present disclosure dissolved in diluents, such as water, saline, or orange juice; (b) capsules, sachets, tablets, lozenges, and troches, each containing a predetermined amount of the active ingredient, as solids or granules; (c) powders; (d) suspensions in an appropriate liquid; and (e) suitable emulsions. Liquid formulations may include diluents, such as water and alcohols, for example, ethanol, benzyl alcohol, and the polyethylene alcohols, either with or without the addition of a pharmaceutically acceptable surfactant. Capsule forms can be of the ordinary hard- or soft-shelled gelatin type containing, for example, surfactants, lubricants, and inert fillers, such as lactose, sucrose, calcium phosphate, and corn starch. Tablet forms can include one or more of lactose, sucrose, mannitol, corn starch, potato starch, alginic acid, microcrystalline cellulose, acacia, gelatin, guar gum, colloidal silicon dioxide, croscarmellose sodium, talc, magnesium stearate, calcium stearate, zinc stearate, stearic acid, and other excipients, colorants, diluents, buffering agents, disintegrating agents, moistening agents, preservatives, flavoring agents, and other pharmacologically compatible excipients. Lozenge forms can comprise the conjugate of the present disclosure in a flavor, usually sucrose and acacia or tragacanth, as well as pastilles comprising the conjugate of the present disclosure in an inert base, such as gelatin and glycerin, or sucrose and acacia, emulsions, gels, and the like containing, in addition to, such excipients as are known in the art.

[1061] The conjugates of the disclosure, alone or in combination with other suitable components, can be delivered via pulmonary administration and can be made into aerosol formulations to be administered via inhalation. These aerosol formulations can be placed into pressurized acceptable propellants, such as dichlorodifluoromethane, propane, nitrogen, and the like. They also may be formulated as pharmaceuticals for non-pressured preparations, such as in a nebulizer or an atomizer. Such spray formulations also may be used to spray mucosa. In some embodiments, the conjugate is formulated into a powder blend or into microparticles or nanoparticles. Suitable pulmonary formulations are known in the art. See, e.g., Qian et al., Int J Pharm 366: 218-220 (2009); Adjei and Garren, Pharmaceutical Research, 7(6): 565-569 (1990); Kawashima et al., J Controlled Release 62(1-2): 279-287 (1999); Liu et al., Pharm Res 10(2): 228-232 (1993); International Patent Application Publication Nos. WO 2007/133747 and WO 2007/141411.

[1062] Formulations suitable for parenteral administration include aqueous and non-aqueous, isotonic sterile injection solutions, which can contain anti-oxidants, buffers, bacteriostats, and solutes that render the formulation isotonic with the blood of the intended recipient, and aqueous and non-aqueous sterile suspensions that can include suspending agents, solubilizers, thickening agents, stabilizers, and preservatives. The term, “parenteral” means not through the alimentary canal but by some other route such as subcutaneous, intramuscular, intraspinal, or intravenous. The conjugate of the present disclosure can be administered with a physiologically acceptable diluent in a pharmaceutical carrier, such as a sterile liquid or mixture of liquids, including water, saline, aqueous dextrose and related sugar solutions, an alcohol, such as ethanol or hexadecyl alcohol, a glycol, such as propylene glycol or polyethylene glycol, dimethylsulfoxide, glycerol, ketals such as 2,2-dimethyl-153-dioxolane-4-methanol, ethers, poly(ethyleneglycol) 400, oils, fatty acids, fatty acid esters or glycerides, or acetylated fatty acid glycerides with or without the addition of a pharmaceutically acceptable surfactant, such as a soap or a detergent, suspending agent, such as pectin, carbomers, methylcellulose, hydroxypropylmethylcellulose, or carboxymethylcellulose, or emulsifying agents and other pharmaceutical adjuvants.

[1063] Oils, which can be used in parenteral formulations include petroleum, animal, vegetable, or synthetic oils. Specific examples of oils include peanut, soybean, sesame, cottonseed, corn, olive, petrolatum, and mineral. Suitable fatty acids for use in parenteral formulations include oleic acid, stearic acid, and isostearic acid. Ethyl oleate and isopropyl myristate are examples of suitable fatty acid esters.

[1064] Suitable soaps for use in parenteral formulations include fatty alkali metal, ammonium, and triethanolamine salts, and suitable detergents include (a) cationic detergents such as, for example, dimethyl dialkyl ammonium halides, and alkyl pyridinium halides, (b) anionic detergents such as, for example, alkyl, aryl, and olefin sulfonates, alkyl, olefin, ether, and monoglyceride sulfates, and sulfosuccinates, (c) nonionic detergents such as, for example, fatty amine oxides, fatty acid alkanolamides, and polyoxyethylenepolypropylene copolymers, (d) amphoteric detergents such as, for example, alkyl-β-aminopropionates, and 2-alkyl-imidazoline quaternary ammonium salts, and (e) mixtures thereof.

[1065] The parenteral formulations will typically contain from about 0.5% to about 25% by weight of Q-L-Y conjugate of the present disclosure in solution. Preservatives and buffers may be used. In order to minimize or eliminate irritation at the site of injection, such compositions may contain one or more nonionic surfactants having a hydrophile-lipophile balance (HLB) of from about 12 to about 17. The quantity of surfactant in such formulations will typically range from about 5% to about 15% by weight. Suitable surfactants include polyethylene glycol sorbitan fatty acid esters, such as sorbitan monooleate and the high molecular weight adducts of ethylene oxide with a hydrophobic base, formed by the condensation of propylene oxide with propylene glycol. The parenteral formulations can be presented in unit-dose or multi-dose sealed containers, such as ampoules and vials, and can be stored in a freeze-dried (lyophilized) condition requiring only the addition of the sterile liquid excipient, for example, water, for injections, immediately prior to use. Extemporaneous injection solutions and suspensions can be prepared from sterile powders, granules, and tablets of the kind previously described.

[1066] Injectable formulations are in accordance with the invention. The requirements for effective pharmaceutical carriers for injectable compositions are well-known to those of ordinary skill in the art (see, e.g., Pharmaceutics and Pharmacy Practice, J. B. Lippincott Company, Philadelphia, Pa., Banker and Chalmers, eds., pages 238-250 (1982), and ASHP Handbook on Injectable Drugs, Toissel, 4th ed., pages 622-630 (1986)).

[1067] Additionally, the conjugate of the present disclosures can be made into suppositories for rectal administration by mixing with a variety of bases, such as emulsifying bases or water-soluble bases. Formulations suitable for vaginal administration can be presented as pessaries, tampons, creams, gels, pastes, foams, or spray formulas containing, in addition to the active ingredient, such carriers as are known in the art to be appropriate.

[1068] It will be appreciated by one of skill in the art that, in addition to the above-described pharmaceutical compositions, the conjugate of the disclosure can be formulated as inclusion complexes, such as cyclodextrin inclusion complexes, or liposomes.

### Dose

[1069] The Q-L-Y conjugates of the disclosure are believed to be useful in methods of treating a disease or medical condition in which glucagon receptor agonism, GLP-1 receptor agonism, GIP receptor agonism, glucagon receptor/GLP-1 receptor co-agonism, glucagon receptor/GIP receptor co-agonism, GLP-1 receptor/GIP receptor co-agonism or glucagon receptor/GLP-1 receptor/GIP receptor tri-agonism plays a role. For purposes of the disclosure, the amount or dose of the conjugate of the present disclosure administered should be sufficient to effect, e.g., a therapeutic or prophylactic response, in the subject or animal over a reasonable time frame. For example, the dose of the conjugate of the present disclosure should be sufficient to stimulate cAMP secretion from cells as described herein or sufficient to decrease blood glucose levels, fat levels, food intake levels, or body weight of a mammal, in a period of from about 1 to 4 minutes, 1 to 4 hours or 1 to 4 weeks or longer, e.g., 5 to 20 or more weeks, from the time of administration. In certain embodiments, the time period could be even longer. The dose will be determined by the efficacy of the particular conjugate of the present disclosure and the condition of the animal (e.g., human), as well as the body weight of the animal (e.g., human) to be treated.

[1070] Many assays for determining an administered dose are known in the art. For purposes herein, an assay, which comprises comparing the extent to which blood glucose levels are lowered upon administration of a given dose of the conjugate of the present disclosure to a mammal among a set of mammals of which is each given a different dose of the conjugate, could be used to determine a starting dose to be administered to a mammal. The extent to which blood glucose levels are lowered upon administration of a certain dose can be assayed by methods known in the art, including, for instance, the methods described herein in the Examples section.

[1071] The dose of the conjugate of the present disclosure also will be determined by the existence, nature and extent of any adverse side effects that might accompany the administration of a particular conjugate of the present disclosure. Typically, the attending physician will decide the dosage of the conjugate of the present disclosure with which to treat each individual patient, taking into consideration a variety of factors, such as age, body weight, general health, diet, sex, conjugate of the present disclosure to be administered, route of administration, and the severity of the condition being treated. By way of example and not intending to limit the invention, the dose of the conjugate of the present disclosure can be about 0.0001 to about 1 g/kg body weight of the subject being treated/day, from about 0.0001 to about 0.001 g/kg body weight/day, or about 0.01 mg to about 1 g/kg body weight/day.

[1072] In some embodiments, the pharmaceutical composition comprises any of the conjugates disclosed herein at a purity level suitable for administration to a patient. In some embodiments, the conjugate has a purity level of at least about 90%, about 91%, about 92%, about 93%, about 94%, about 95%, about 96%, about 97%, about 98% or about 99%, and a pharmaceutically acceptable diluent, carrier or excipient. The pharmaceutical composition in some aspects comprise the conjugate of the present disclosure at a concentration of at least A, wherein A is about 0.001 mg/ml, about 0.01 mg/ml, 0 about 1 mg/ml, about 0.5 mg/ml, about 1 mg/ml, about 2 mg/ml, about 3 mg/ml, about 4 mg/ml, about 5 mg/ml, about 6 mg/ml, about 7 mg/ml, about 8 mg/ml, about 9 mg/ml, about 10 mg/ml, about 11 mg/ml, about 12 mg/ml, about 13 mg/ml, about 14 mg/ml, about 15 mg/ml, about 16 mg/ml, about 17 mg/ml, about 18 mg/ml, about 19 mg/ml, about 20 mg/ml, about 21 mg/ml, about 22 mg/ml, about 23 mg/ml, about 24 mg/ml, about 25 mg/ml or higher. In some embodiments, the pharmaceutical composition comprises the conjugate at a concentration of at most B, wherein B is about 30 mg/ml, about 25 mg/ml, about 24 mg/ml, about 23, mg/ml, about 22 mg/ml, about 21 mg/ml, about 20 mg/ml, about 19 mg/ml, about 18 mg/ml, about 17 mg/ml, about 16 mg/ml, about 15 mg/ml, about 14 mg/ml, about 13 mg/ml, about 12 mg/ml, about 11 mg/ml, about 10 mg/ml, about 9 mg/ml, about 8 mg/ml, about 7 mg/ml, about 6 mg/ml, about 5 mg/ml, about 4 mg/ml, about 3 mg/ml, about 2 mg/ml, about 1 mg/ml, or about 0.1 mg/ml. In some embodiments, the compositions may contain an conjugate at a concentration range of A to B mg/ml, for example, about 0.001 to about 30.0 mg/ml.

### Targeted Forms

[1073] One of ordinary skill in the art will readily appreciate that the Q-L-Y conjugates of the disclosure can be modified in any number of ways, such that the therapeutic or prophylactic efficacy of the conjugate of the present disclosures is increased through the modification. For instance, the conjugate of the present disclosure can be further conjugated either directly or indirectly through a linker to a targeting moiety. The practice of conjugating compounds, e.g., glucagon conjugates described herein, to targeting moieties is known in the art. See, for instance, Wadhwa et al., J Drug Targeting, 3, 111-127 (1995) and U.S. Pat. No. 5,087,616. The term “targeting moiety” as used herein, refers to any molecule or agent that specifically recognizes and binds to a cell-surface receptor, such that the targeting moiety directs the delivery of the conjugate of the present disclosures to a population of cells on which surface the receptor (the glucagon receptor, the GLP-1 receptor) is expressed. Targeting moieties include, but are not limited to, antibodies, or fragments thereof, peptides, hormones, growth factors, cytokines, and any other natural or non-natural ligands, which bind to cell surface receptors (e.g., Epithelial Growth Factor Receptor (EGFR), T-cell receptor (TCR), B-cell receptor (BCR), CD28, Platelet-derived Growth Factor Receptor (PDGF), nicotinic acetylcholine receptor (nAChR), etc.). As used herein a “linker” is a bond, molecule or group of molecules that binds two separate entities to one another. Linkers may provide for optimal spacing of the two entities or may further supply a labile linkage that allows the two entities to be separated from each other. Labile linkages include photocleavable groups, acid-labile moieties, base-labile moieties, hydrolyzable groups, and enzyme-cleavable groups. The term “linker” in some embodiments refers to any agent or molecule that bridges the conjugate of the present disclosures to the targeting moiety. One of ordinary skill in the art recognizes that sites on the conjugate of the present disclosures, which are not necessary for the function of the conjugate of the present disclosures, are ideal sites for attaching a linker and/or a targeting moiety, provided that the linker and/or targeting moiety, once attached to the conjugate of the present disclosures, do(es) not interfere with the function of the conjugate of the present disclosures, i.e., the ability to stimulate cAMP secretion from cells, to treat diabetes or obesity. One of ordinary skill in the art recognizes that sites on the peptide of the present disclosures (Q), which are not necessary for the function of the peptide of the present disclosures (e.g., glucagon agonist peptide, glucagon antagonist peptide, GLP-1 agonist peptide, GIP agonist peptide, or a combination of any of the foregoing), are ideal sites for attaching a linker and/or a targeting moiety, provided that the linker and/or targeting moiety, once attached to the peptide of the present disclosures (O), does not interfere with the function of the peptide of the present disclosures.

### Controlled Release Formulations

[1074] Alternatively, the glucagon conjugates described herein can be modified into a depot form, such that the manner in which the conjugate of the present disclosures is released into the body to which it is administered is controlled with respect to time and location within the body (see, for example, U.S. Pat. No. 4,450,150). Depot forms of conjugate of the present disclosures can be, for example, an implantable composition comprising the conjugate of the present disclosures and a porous or non-porous material, such as a polymer, wherein the conjugate of the present disclosures is encapsulated by or diffused throughout the material and/or degradation of the non-porous material. The depot is then implanted into the desired location within the body and the conjugate of the present disclosures are released from the implant at a predetermined rate.

[1075] The pharmaceutical composition in certain aspects is modified to have any type of in vivo release profile. In some aspects, the pharmaceutical composition is an immediate release, controlled release, sustained release, extended release, delayed release, or bi-phasic release formulation. Methods of formulating peptides or conjugates for controlled release are known in the art. See, for example, Qian et al., J Pharm 374: 46-52 (2009) and International Patent Application Publication Nos. WO 2008/130158, WO2004/033036; WO2000/032218; and WO 1999/040942.

[1076] The instant compositions may further comprise, for example, micelles or liposomes, or some other encapsulated form, or may be administered in an extended release form to provide a prolonged storage and/or delivery effect. The disclosed pharmaceutical formulations may be administered according to any regime including, for example, daily (1 time per day, 2 times per day, 3 times per day, 4 times per day, 5 times per day, 6 times per day), every two days, every three days, every four days, every five days, every six days, weekly, bi-weekly, every three weeks, monthly, or bi-monthly.

### Uses

[1077] Based on the information provided for the first time herein, it is contemplated that the Q-L-Y conjugates described herein and related pharmaceutical compositions are useful for treatment of a disease or medical condition, in which e.g., the lack of activity at the glucagon receptor, the GLP-1 receptor, the GIP receptor or a combination of any of the foregoing, is a factor in the onset and/or progression of the disease or medical condition. Accordingly, the invention provides a method of treating or preventing a disease or medical condition in a patient, wherein the disease or medical condition is a disease of medical condition in which a lack of GLP-1 receptor activation and/or glucagon receptor activation and/or GIP activation is associated with the onset and/or progression of the disease of medical condition. The method comprises providing to the patient an conjugate in accordance with any of those described herein in an amount effective to treat or prevent the disease or medical condition.

[1078] In some embodiments, the disease or medical condition is metabolic syndrome. Metabolic Syndrome, also known as metabolic syndrome X, insulin resistance syndrome or Reaven's syndrome, is a disorder that affects over 50 million Americans. Metabolic Syndrome is typically characterized by a clustering of at least three or more of the following risk factors: (1) abdominal obesity (excessive fat tissue in and around the abdomen), (2) atherogenic dyslipidemia (blood fat disorders including high triglycerides, low HDL cholesterol and high LDL cholesterol that enhance the accumulation of plaque in the artery walls), (3) elevated blood pressure, (4) insulin resistance or glucose intolerance, (5) prothrombotic state (e.g., high fibrinogen or plasminogen activator inhibitor-1 in blood), and (6) pro-inflammatory state (e.g., elevated C-reactive protein in blood). Other risk factors may include aging, hormonal imbalance and genetic predisposition.

[1079] Metabolic Syndrome is associated with an increased the risk of coronary heart disease and other disorders related to the accumulation of vascular plaque, such as stroke and peripheral vascular disease, referred to as atherosclerotic cardiovascular disease (ASCVD). Patients with Metabolic Syndrome may progress from an insulin resistant state in its early stages to full blown type II diabetes with further increasing risk of ASCVD. Without intending to be bound by any particular theory, the relationship between insulin resistance, Metabolic Syndrome and vascular disease may involve one or more concurrent pathogenic mechanisms including impaired insulin-stimulated vasodilation, insulin resistance-associated reduction in NO availability due to enhanced oxidative stress, and abnormalities in adipocyte-derived hormones such as adiponectin (Lteif and Mather, Can. J. Cardiol. 20 (suppl. B):66B-76B (2004)).

[1080] According to the 2001 National Cholesterol Education Program Adult Treatment Panel (ATP III), any three of the following traits in the same individual meet the criteria for Metabolic Syndrome: (a) abdominal obesity (a waist circumference over 102 cm in men and over 88 cm in women); (b) serum triglycerides (150 mg/dl or above); (c) HDL cholesterol (40 mg/dl or lower in men and 50 mg/dl or lower in women); (d) blood pressure (130/85 or more); and (e) fasting blood glucose (110 mg/dl or above). According to the World Health Organization (WHO), an individual having high insulin levels (an elevated fasting blood glucose or an elevated post meal glucose alone) with at least two of the following criteria meets the criteria for Metabolic Syndrome: (a) abdominal obesity (waist to hip ratio of greater than 0.9, a body mass index of at least 30 kg/m2, or a waist measurement over 37 inches); (b) cholesterol panel showing a triglyceride level of at least 150 mg/dl or an HDL cholesterol lower than 35 mg/dl; (c) blood pressure of 140/90 or more, or on treatment for high blood pressure). (Mathur, Ruchi, “Metabolic Syndrome,” ed. Shiel, Jr., William C., MedicineNet.com, May 11, 2009).

[1081] For purposes herein, if an individual meets the criteria of either or both of the criteria set forth by the 2001 National Cholesterol Education Program Adult Treatment Panel or the WHO, that individual is considered as afflicted with Metabolic Syndrome.

[1082] Without being bound to any particular theory, Q-L-Y conjugates described herein are useful for treating Metabolic Syndrome. Accordingly, the invention provides a method of preventing or treating Metabolic Syndrome, or reducing one, two, three or more risk factors thereof, in a subject, comprising providing to the subject a conjugate described herein in an amount effective to prevent or treat Metabolic Syndrome, or the risk factor thereof.

[1083] In some embodiments, the method treats a hyperglycemic medical condition. In certain aspects, the hyperglycemic medical condition is diabetes, diabetes mellitus type I, diabetes mellitus type II, or gestational diabetes, either insulin-dependent or non-insulin-dependent. In some aspects, the method treats the hyperglycemic medical condition by reducing one or more complications of diabetes including nephropathy, retinopathy and vascular disease.

[1084] In some aspects, the disease or medical condition is obesity. In some aspects, the obesity is drug-induced obesity. In some aspects, the method treats obesity by preventing or reducing weight gain or increasing weight loss in the patient. In some aspects, the method treats obesity by reducing appetite, decreasing food intake, lowering the levels of fat in the patient, or decreasing the rate of movement of food through the gastrointestinal system.

[1085] Because obesity is associated with the onset or progression of other diseases, the methods of treating obesity are further useful in methods of reducing complications associated with obesity including vascular disease (coronary artery disease, stroke, peripheral vascular disease, ischemia reperfusion, etc.), hypertension, onset of diabetes type II, hyperlipidemia and musculoskeletal diseases. The invention accordingly provides methods of treating or preventing these obesity-associated complications.

[1086] In some embodiments, the disease or medical condition is Nonalcoholic fatty liver disease (NAFLD). NAFLD refers to a wide spectrum of liver disease ranging from simple fatty liver (steatosis), to nonalcoholic steatohepatitis (NASH), to cirrhosis (irreversible, advanced scarring of the liver). All of the stages of NAFLD have in common the accumulation of fat (fatty infiltration) in the liver cells (hepatocytes). Simple fatty liver is the abnormal accumulation of a certain type of fat, triglyceride, in the liver cells with no inflammation or scarring. In NASH, the fat accumulation is associated with varying degrees of inflammation (hepatitis) and scarring (fibrosis) of the liver. The inflammatory cells can destroy the liver cells (hepatocellular necrosis). In the terms “steatohepatitis” and “steatonecrosis”, steato refers to fatty infiltration, hepatitis refers to inflammation in the liver, and necrosis refers to destroyed liver cells. NASH can ultimately lead to scarring of the liver (fibrosis) and then irreversible, advanced scarring (cirrhosis). Cirrhosis that is caused by NASHis the last and most severe stage in the NAFLD spectrum. (Mendler, Michel, “Fatty Liver: Nonalcoholic Fatty Liver Disease (NAFLD) and Nonalcoholic Steatohepatitis (NASH),” ed. Schoenfield, Leslie J., MedicineNet.com, Aug. 29, 2005).

[1087] Alcoholic Liver Disease, or Alcohol-Induced Liver Disease, encompasses three pathologically distinct liver diseases related to or caused by the excessive consumption of alcohol: fatty liver (steatosis), chronic or acute hepatitis, and cirrhosis. Alcoholic hepatitis can range from a mild hepatitis, with abnormal laboratory tests being the only indication of disease, to severe liver dysfunction with complications such as jaundice (yellow skin caused by bilirubin retention), hepatic encephalopathy (neurological dysfunction caused by liver failure), ascites (fluid accumulation in the abdomen), bleeding esophageal varices (varicose veins in the esophagus), abnormal blood clotting and coma. Histologically, alcoholic hepatitis has a characteristic appearance with ballooning degeneration of hepatocytes, inflammation with neutrophils and sometimes Mallory bodies (abnormal aggregations of cellular intermediate filament proteins). Cirrhosis is characterized anatomically by widespread nodules in the liver combined with fibrosis. (Worman, Howard J., “Alcoholic Liver Disease”, Columbia University Medical Center website).

[1088] Without being bound to any particular theory, the Q-L-Y conjugates described herein are useful for the treatment of Alcoholic Liver Disease, NAFLD, or any stage thereof, including, for example, steatosis, steatohepatitis, hepatitis, hepatic inflammation, NASH, cirrhosis, or complications thereof. Accordingly, the invention provides a method of preventing or treating Alcoholic Liver Disease, NAFLD, or any stage thereof, in a subject comprising providing to a subject a conjugate described herein in an amount effective to prevent or treat Alcoholic Liver Disease, NAFLD, or the stage thereof. Such treatment methods include reduction in one, two, three or more of the following: liver fat content, incidence or progression of cirrhosis, incidence of hepatocellular carcinoma, signs of inflammation, e.g., abnormal hepatic enzyme levels (e.g., aspartate aminotransferase AST and/or alanine aminotransferase ALT, or LDH), elevated serum ferritin, elevated serum bilirubin, and/or signs of fibrosis, e.g., elevated TGF-beta levels. In preferred embodiments, the Q-L-Y conjugates described herein are used treat patients who have progressed beyond simple fatty liver (steatosis) and exhibit signs of inflammation or hepatitis. Such methods may result, for example, in reduction of AST and/or ALT levels.

[1089] GLP-1 and exendin-4 have been shown to have some neuroprotective effect. The invention also provides uses of the Q-L-Y conjugates described herein in treating neurodegenerative diseases, including but not limited to Alzheimer's disease, Parkinson's disease, Multiple Sclerosis, Amylotrophic Lateral Sclerosis, other demyelination related disorders, senile dementia, subcortical dementia, arteriosclerotic dementia, AIDS-associated dementia, or other dementias, a central nervous system cancer, traumatic brain injury, spinal cord injury, stroke or cerebral ischemia, cerebral vasculitis, epilepsy, Huntington's disease, Tourette's syndrome, Guillain Barre syndrome, Wilson disease, Pick's disease, neuroinflammatory disorders, encephalitis, encephalomyelitis or meningitis of viral, fungal or bacterial origin, or other central nervous system infections, prion diseases, cerebellar ataxias, cerebellar degeneration, spinocerebellar degeneration syndromes, Friedreichs ataxia, ataxia telangiectasia, spinal dysmyotrophy, progressive supranuclear palsy, dystonia, muscle spasticity, tremor, retinitis pigmentosa, striatonigral degeneration, mitochondrial encephalo-myopathies, neuronal ceroid lipofuscinosis, hepatic encephalopathies, renal encephalopathies, metabolic encephalopathies, toxin-induced encephalopathies, and radiation-induced brain damage.

[1090] In some embodiments, the disease or medical condition is hypoglycemia. In some embodiments, the patient is a diabetic patient and the hypoglycemia is induced by the administration of insulin. In specific aspects, the method comprises providing the conjugate of the present disclosure in combination with insulin so that the conjugate buffers the hypoglycemic effects of the bolus administration of insulin.

[1091] In some embodiments, the Q-L-Y conjugates are used in conjunction with parenteral administration of nutrients to non-diabetic patients in a hospital setting, e.g., to patients receiving parenteral nutrition or total parenteral nutrition. Nonlimiting examples include surgery patients, patients in comas, patients with digestive tract illness, or a nonfunctional gastrointestinal tract (e.g. due to surgical removal, blockage or impaired absorptive capacity, Crohn's disease, ulcerative colitis, gastrointestinal tract obstruction, gastrointestinal tract fistula, acute pancreatitis, ischemic bowel, major gastrointestinal surgery, certain congenital gastrointestinal tract anomalies, prolonged diarrhea, or short bowel syndrome due to surgery, patients in shock, and patients undergoing healing processes often receive parenteral administration of carbohydrates along with various combinations of lipids, electrolytes, minerals, vitamins and amino acids. The Q-L-Y conjugates and the parenteral nutrition composition can be administered at the same time, at different times, before, or after each other, provided that the Q-L-Y conjugate is exerting the desired biological effect at the time that the parenteral nutrition composition is being digested. For example, the parenteral nutrition may be administered, 1, 2 or 3 times per day, while the glucagon conjugate is administered once every other day, three times a week, two times a week, once a week, once every 2 weeks, once every 3 weeks, or once a month.

[1092] As used herein, the terms “treat,” and “prevent” as well as words stemming therefrom, do not necessarily imply 100% or complete treatment or prevention. Rather, there are varying degrees of treatment or prevention of which one of ordinary skill hi the art recognizes as having a potential benefit or therapeutic effect. In this respect, the inventive methods can provide any amount of any level of treatment or prevention of a disease or medical condition in a mammal Furthermore, the treatment or prevention provided by the method can include treatment or prevention of one or more conditions or symptoms of the disease or medical condition. For example, with regard to methods of treating obesity, the method in some embodiments, achieves a decrease in food intake by or fat levels in a patient. Also, for purposes herein, “prevention” can encompass delaying the onset of the disease, or a symptom or condition thereof.

[1093] With regard to the above methods of treatment, the patient is any host. In some embodiments, the host is a mammal. As used herein, the term “mammal” refers to any vertebrate animal of the mammalia class, including, but not limited to, any of the monotreme, marsupial, and placental taxas. In some embodiments, the mammal is one of the mammals of the order Rodentia, such as mice and hamsters, and mammals of the order Logomorpha, such as rabbits. In certain embodiments, the mammals are from the order Carnivora, including Felines (cats) and Canines (dogs). In certain embodiments, the mammals are from the order Artiodactyla, including Bovines (cows) and S wines (pigs) or of the order Perssodactyla, including Equines (horses). In some instances, the mammals are of the order Primates, Ceboids, or Simoids (monkeys) or of the order Anthropoids (humans and apes). In particular embodiments, the mammal is a human.

### Combinations

[1094] The Q-L-Y conjugates described herein may be administered alone or in combination with other therapeutic agents which aim to treat or prevent any of the diseases or medical conditions described herein. For example, the Q-L-Y conjugates described herein may be co-administered with (simultaneously or sequentially) an anti-diabetic or anti-obesity agent. Anti-diabetic agents known in the art or under investigation include insulin, leptin, Peptide YY (PYY), Pancreatic Peptide (PP), fibroblast growth factor 21 (FGF21), Y2Y4 receptor agonists, sulfonylureas, such as tolbutamide (Orinase), acetohexamide (Dymelor), tolazamide (Tolinase), chlorpropamide (Diabinese), glipizide (Glucotrol), glyburide (Diabeta, Micronase, Glynase), glimepiride (Amaryl), or gliclazide (Diamicron); meglitinides, such as repaglinide (Prandin) or nateglinide (Starlix); biguanides such as metformin (Glucophage) or phenformin; thiazolidinediones such as rosiglitazone (Avandia), pioglitazone (Actos), or troglitazone

[1095] (Rezulin), or other PPARy inhibitors; alpha glucosidase inhibitors that inhibit carbohydrate digestion, such as miglitol (Glyset), acarbose (Precose/Glucobay); exenatide (Byetta) or pramlintide; Dipeptidyl peptidase-4 (DPP-4) inhibitors such as vildagliptin or sitagliptin; SGLT (sodium-dependent glucose transporter 1) inhibitors; glucokinase activators (GKA); glucagon receptor antagonists (GRA); or FBPase (fructose 1,6-bisphosphatase) inhibitors.

[1096] Anti-obesity agents known in the art or under investigation include appetite suppressants, including phenethylamine type stimulants, phentermine (optionally with fenfluramine or dexfenfluramine), diethylpropion (Tenuate®), phendimetrazine (Prelu-2®, Bontril®), benzphetamine (Didrex®), sibutramine (Meridia®, Reductil®); rimonabant (Acomplia®), other cannabinoid receptor antagonists; oxyntomodulin; fluoxetine hydrochloride (Prozac); Qnexa (topiramate and phentermine), Excalia (bupropion and zonisamide) or Contrave (bupropion and naltrexone); or lipase inhibitors, similar to XENICAL (Orlistat) or Cetilistat (also known as ATL-962), or GT 389-255.

[1097] The Q-L-Y conjugates described herein in some embodiments are co-administered with an agent for treatment of non-alcoholic fatty liver disease or NASH. Agents used to treat non-alcoholic fatty liver disease include ursodeoxycholic acid (a.k.a., Actigall, URSO, and Ursodiol), Metformin (Glucophage), rosiglitazone (Avandia), Clofibrate, Gemfibrozil, Polymixin B, and Betaine.

[1098] The Q-L-Y conjugates described herein in some embodiments are co-administered with an agent for treatment of a neurodegenerative disease, e.g., Parkinson's Disease. Anti-Parkinson's Disease agents are furthermore known in the art and include, but not limited to, levodopa, carbidopa, anticholinergics, bromocriptine, pramipexole, and ropinirole, amantadine, and rasagiline.

[1099] In view of the foregoing, the invention further provides pharmaceutical compositions and kits additionally comprising one of these other therapeutic agents. The additional therapeutic agent may be administered simultaneously or sequentially with the conjugate of the present disclosure. In some aspects, the conjugate is administered before the additional therapeutic agent, while in other aspects, the conjugate is administered after the additional therapeutic agent.

### Kits

[1100] The Q-L-Y conjugates of the present disclosure can be provided in accordance with one embodiment as part of a kit. Accordingly, in some embodiments, a kit for administering a Q-L-Y conjugate to a patient in need thereof is provided wherein the kit comprises a Q-L-Y conjugate as described herein.

[1101] In one embodiment the kit is provided with a device for administering the Q-L-Y conjugate composition to a patient, e.g. syringe needle, pen device, jet injector or other needle-free injector. The kit may alternatively or in addition include one or more containers, e.g., vials, tubes, bottles, single or multi-chambered pre-filled syringes, cartridges, infusion pumps (external or implantable), jet injectors, pre-filled pen devices and the like, optionally containing the glucagon conjugate in a lyophilized form or in an aqueous solution. The kits in some embodiments comprise instructions for use. In accordance with one embodiment the device of the kit is an aerosol dispensing device, wherein the composition is prepackaged within the aerosol device. In another embodiment the kit comprises a syringe and a needle, and in one embodiment the sterile glucagon composition is prepackaged within the syringe.

[1102] The following examples are given merely to illustrate the present invention and not in any way to limit its scope.

### EXAMPLES

### Example 1

### Synthesis of Peptide Fragments of Glucagon Superfamily Peptides

### Materials

[1103] All peptides described herein were amidated unless specified otherwise. MBHA (4-methylbenzhydrylamine polystyrene) resin was used during peptide synthesis. MBHA resin, 100-180 mesh, 1% divinylbenzene (DVB) cross-linked polystyrene; loading of 0.7-1.0 mmol/g), Boc-protected (tert-butylcarbamates) and Fmoc protected (9-fluoenylmethyl carbamate) amino acids were purchased from Midwest Biotech. The solid phase peptide syntheses using Boc-protected amino acids were performed on an Applied Biosystem 430A Peptide Synthesizer. Fmoc protected amino acid synthesis was performed using the Applied Biosystems Model 433 Peptide Synthesizer. In specific embodiments, the following procedures can be used:

General Peptide Synthesis Protocol with Boc-Chemistry Strategy

[1104] Synthesis of peptides using Boc chemistry was performed on the Applied Biosystem Model 430A Peptide Synthesizer. Synthetic peptides were constructed by sequential addition of amino acids to a cartridge containing 2 mmol of Boc protected amino acid. Specifically, the synthesis was carried out using 3-(Diethoxy-phosphoryloxy)-3H-benzo[d][1,2,3]triazin-4-one (DEPBT) or HBTU as the coupling agent with single couplings. At the end of the coupling step, the peptidyl-resin was treated with trifluoroacetic acid (TFA) to remove the N-terminal Boc protecting group. The resin was then washed repeatedly with dimethylformamide (DMF) and this repetitive cycle was repeated for the desired number of coupling steps. Boc amino acids and HBTU were obtained from Midwest Biotech (Fishers, Ind.). General side chain protecting groups used were: Arg(Tos), Asn(Xan), Asp(OcHex), Cys(pMeBzl), His(Bom), Lys(2Cl—Z), Ser(OBzl), Thr(OBzl), Tyr(2Br—Z), and Trp(CHO). Boc-Glu(OFm)-OH and Boc-Lys(Fmoc)-OH (Chem-Impex, Wood dale, IL) were used in the lactam-bridge formation sites.

[1105] After assembly of the peptides, the Fmoc protected side chains were deprotected using 20% piperidine treatment. For the lactamization, orthogonal protecting groups were selected for Glu and Lys (e.g., Glu(Fm), Lys(Fmoc)). After removal of the protecting groups and before HF cleavage, cyclization was performed as described previously (see, e.g., International Patent Application Publication No. WO2008/101017). HF treatment of the peptidyl-resin

[1106] The peptidyl-resin was treated with anhydrous HF in the presence of p-cresol and dimethyl sulfide, which typically yielded approximately 350 mg (about 50% yield) of a crude deprotected-peptide. Specifically, the peptidyl-resin (30 mg to 200 mg) was placed in a hydrogen fluoride (HF) reaction vessel for cleavage. Then, 500 μL of p-cresol was added to the vessel as a carbonium ion scavenger. The vessel was attached to the HF system and submerged in a methanol/dry ice mixture. The vessel was evacuated with a vacuum pump and 10 mL of HF was distilled into the reaction vessel. This reaction mixture of the peptidyl-resin and the HF was stirred for one hour at 0° C., after which a vacuum was established and the HF was quickly evacuated (10-15 min) The vessel was removed carefully and filled with approximately 35 mL of ether to precipitate the peptide and to extract the p-cresol and small molecule organic protecting groups resulting from HF treatment. This mixture was filtered utilizing a Teflon filter and repeated twice to remove all excess cresol. This filtrate was discarded. The precipitated peptide was dissolved in approximately 20 mL of 10% acetic acid (aq). This filtrate, which contained the desired peptide, was collected and lyophilized.

[1107] An analytical HPLC analysis of the crude solubilized peptide was conducted under the following conditions [4.6×30 mm Xterra C8, 1.50 mL/min, 220 nm, A buffer 0.1% TFA/10% acetonitrile (CH₃CN), B buffer 0.1% TFA/100% CH₃CN, gradient 5-95% B over 15 minutes]. The extract was diluted twofold with water and loaded onto a 2.2×25 cm Vydac C4 preparative reverse phase column and eluted using an acetonitrile gradient on a Waters HPLC system (A buffer of 0.1% TFA/10% CH₃CN, B buffer of 0.1% TFA/10% CH₃CN and a gradient of 0-100% B over 120 minutes at a flow of 15.00 mL/min. HPLC analysis of the purified peptide demonstrated greater than 95% purity and electrospray ionization mass spectral analysis was used to confirm the identity of the peptide.

General Peptide Synthesis Protocol with Fmoc-Chemistry Strategy:

[1108] Peptides were synthesized on an ABI 433A automated peptide synthesizer using standard Fmoc chemistry with Rink MBHA amide resin or first amino acid attached Wang resin (Novabiochem, San Diego, Calif.) using DIC/HOBT as coupling reagent. The side chain protecting groups of Nα-Fmoc [N-(9-fluorenyl)methoxycarbonyl]amino acids were as follows: Arg, Pmc; Asp, OtBu; Cys, Trt; Gln, Trt; His, Trt; Lys, Boc; Ser, tBu, Tyr, tBu; and Trp, Boc (Pmc=2,2,5,7,8-pentamethylchoman-6-sulfonyl, OtBu=tert-butyl ester, Trt=trityl, Boc=tert-butyloxycarbonyl, and tBu=tert-butyl ester). Fmoc-Glu(O-2-PhiPr)-OH and Fmoc-Lys(Mmt)-OH (Novabiochem, San Diego, Calif.) were incorporated in the lactam-bridge formation sites.

[1109] After solid phase synthesis, the 2-phenylisopropyl (2-PhiPr) group on the Glu and the 4-methoxytrityl (Mmt) group on the Lys were removed by flashing 1% TFA/DCM though the peptidyl resin. For the lactam-bridge formation, usually 150 mg (0.5 mmole, 5-fold) BEPBT were added in 10% DIEA/DMF and reacted for 2 to 4 h until ninhydrin test shown negative.

[1110] Peptides were cleaved from the resin with cleavage cocktail containing 85% TFA, 5% phenol, 5% water and 5% thioanisole (2.5% EDT was added when peptide contains Cysteine). Crude peptides were precipitated in ether, centrifuged, and lyophilized. Peptides were then analyzed by analytical HPLC and checked by ESI or MALDI-TOF mass spectrometry. Peptides were purified by the general HPLC purification procedure.

### Peptide Acylation

[1111] Acylated peptides were prepared as follows. Peptides were synthesized on a solid support resin using either a CS Bio 4886 Peptide Synthesizer or Applied Biosystems 430A Peptide Synthesizer. In situ neutralization chemistry was used as described by Schnolzer et al., Int. J. Peptide Protein Res. 40: 180-193 (1992). For acylated peptides, the target amino acid residue to be acylated (e.g., position ten, relative to the amino acid position numbering of SEQ ID NO: 1601) was substituted with an N ε-FMOC lysine residue. Treatment of the completed N-terminally BOC protected peptide with 20% piperidine in DMF for 30 minutes removed FMOC/formyl groups. Coupling to the free ε-amino Lys residue was achieved by reacting a ten-fold molar excess of either an FMOC-protected spacer amino acid (ex. FMOC-Glu-OtBu) or acyl chain (e.g. CH₃(CH₂)₁₄—COOH) and benzotriazol-1-yl-oxytripyrrolidinophosphonium hexafluorophosphate (PyBOP), N,N′ diisopropylcarbodiimide (DIC), or DEPBT coupling reagent in DMF/diisopropylethylamine (DIEA). Subsequent removal of the spacer amino acid's FMOC group was followed by repetition of coupling with an acyl chain. Final treatment with 100% TFA resulted in removal of any side chain protecting groups and the N-terminal BOC group. Peptide resins were neutralized with 5% DIEA/DMF, dried, and then cleaved from the support using HF/p-cresol, 95:5, at 0° C. for one hour. Following ether extraction, a 5% acetic acid (HOAc) solution was used to solvate the crude peptide. A sample of the solution was then verified to contain the correct molecular weight peptide by ESI-MS. Correct peptides were purified by reverse phase (RP)HPLC using a linear gradient of 10% CH₃CN/0.1% TFA to 0.1% TFA in 100% CH₃CN. A Vydac C18 22 mm×250 mm protein column was used for the purification. Acylated peptide conjugates generally completed elution by a buffer ratio of 20:80. Portions were pooled together and checked for purity on an analytical RP-HPLC. Pure fractions were lyophilized yielding white, solid peptides.

[1112] If a peptide comprised a lactam bridge and target residues to be acylated, acylation was carried out as described above upon addition of that amino acid to the peptide backbone.

### Peptide PEGylation to Form Thioether Linkages

[1113] For peptide PEGylation, 40 kDa methoxy poly(ethylene glycol) idoacetamide was reacted with a molar equivalent of peptide in 7M Urea, 50 mM Tris-HCl buffer using the minimal amount of solvent needed to dissolve both peptide and PEG into a clear solution (generally less than 2 mL for a reaction using 2 to 3 mg peptide). Vigorous stirring at room temperature commenced for 4 to 6 hours and the reaction analyzed by analytical RP-HPLC. PEGylated products appeared distinctly from the starting material with decreased retention times. Purification was performed on a Vydac C4 column with conditions similar to those used for the initial peptide purification. Elution occurred around buffer ratios of 50:50. Fractions of pure PEGylated peptide were found and lyophilized. Yields were above 50%, varying per reaction.

### Peptide PEGylation to Form Maleimido Linkages

[1114] For peptide PEGylation, the peptide containing a cysteine was dissolved in phosphate buffered saline (5- to 0 mg/mL) and 0.01 Methylenediamine tetraacetic acid is added (10-15% of total volume). Excess (2-fold) maleimido methoxyPEG reagent (Dow) was added and the reaction was stirred at room temperature while monitoring reaction progress by high performance liquid chromatography (HPLC). After 8-24 hrs, the reaction mixture is acidified and loaded onto a preparative reverse phase column for purification using 0.1% tetrafluoroacetic acid (TFA)/acetonitrile in the gradient mode. The appropriate fractions were combined and lyophilized to give the desired pegylated derivatives.

### Analysis Using Mass Spectrometry

[1115] The mass spectra were obtained using a Sciex API-III electrospray quadrapole mass spectrometer with a standard ESI ion source. Ionization conditions that were used are as follows: ESI in the positive-ion mode; ion spray voltage, 3.9 kV; orifice potential, 60 V. The nebulizing and curtain gas used was nitrogen flow rate of 0.9 L/min Mass spectra were recorded from 600-1800 Thompsons at 0.5 Th per step and 2 msec dwell time. The sample (about 1 mg/mL) was dissolved in 50% aqueous acetonitrile with 1% acetic acid and introduced by an external syringe pump at the rate of 5 μL/min.

[1116] When the peptides were analyzed in PBS solution by ESI MS, they were first desalted using a ZipTip solid phase extraction tip containing 0.6 μL C4 resin, according to instructions provided by the manufacturer (Millipore Corporation, Billerica, Mass., see the Millipore website of the world wide web at millipore.com/catalogue.nsf/docs/C5737).

### High Performance Liquid Chromatography (HPLC) Analysis:

[1117] Preliminary analyses were performed with these crude peptides to get an approximation of their relative conversion rates in Phosphate Buffered Saline (PBS) buffer (pH, 7.2) using high performance liquid chromatography (HPLC) and MALDI analysis. The crude peptide samples were dissolved in the PBS buffer at a concentration of 1 mg/mL. 1 mL of the resulting solution was stored in a 1.5 mL HPLC vial which was then sealed and incubated at 37° C. Aliquots of 100 μl were drawn out at various time intervals, cooled to room temperature and analyzed by HPLC.

[1118] The HPLC analyses were performed using a Beckman System Gold Chromatography system using a UV detector at 214 nm HPLC analyses were performed on a 150 mm×4.6 mm C18 Vydac column The flow rate was 1 mL/min Solvent A contained 0.1% TFA in distilled water, and solvent B contained 0.1% TFA in 90% CH₃CN. A linear gradient was employed (40% to 70% B in 15 minutes). The data were collected and analyzed using Peak Simple Chromatography software.

### Example 2

[1119] The ability of each peptide to induce cAMP was measured in a firefly luciferase-based reporter assay. The cAMP production that is induced is directly proportional to the glucagon fragment binding to the glucagon receptor or GIP receptor or GLP-1 receptor. HEK293 cells co-transfected with the receptor and luciferase gene linked to a cAMP responsive element were employed for the bioassay.

[1120] The cells were serum-deprived by culturing 16 hours in Dulbecco-modified Minimum Essential Medium (Invitrogen, Carlsbad, Calif.) supplemented with 0.25% Bovine Growth Serum (HyClone, Logan, Utah) and then incubated with serial dilutions of glucagon fragments for 5 hours at 37° C., 5% CO₂ in 96 well poly-D-Lysine-coated “Biocoat” plates (BD Biosciences, San Jose, Calif.). At the end of the incubation, 100 μL of LucLite luminescence substrate reagent (Perkin Elmer, Wellesley, Mass.) were added to each well. The plate was shaken briefly, incubated 10 min in the dark and light output was measured on MicroBeta-1450 liquid scintillation counter (Perkin-Elmer, Wellesley, Mass.). The effective 50% concentrations (EC₅₀) and inhibitory 50% concentrations (IC₅₀) were calculated by using Origin software (OriginLab, Northampton, Mass.). All EC₅₀s and IC₅₀s are reported in the following examples in nM, unless indicated otherwise.

### Example 3

### Preparation of GLP-1/Estrogen(3-Ether)

[1121] A GLP-1 analog was synthesized using the Boc protocol disclosed in Example 1 with a Boc-Lys(Fmoc)-OH residue at the C-terminus. (The Fmoc group protecting the side chain amine on the lysine residue was removed with 20% piperidine/DMF for 30 minutes prior to the addition of product 4.) Estradiol 17-acetate was derivatized at the 3-position by reaction with ethyl 2-bromoacetic acid. The derivatized estradiol was hydrolyzed and reacted with the C-terminal lysine of the GLP-1 analog to result in the GLP-1/Estrogen(3-Ether) conjugate, as shown below:

[chemical structure]

[chemical structure]

[1122] Specifically, equimolar amounts of estradiol 17-acetate (1) and ethyl 2-bromoacetate (2) were dissolved in dioxane/K₂CO₃, and the reaction was stirred for 16 hours under reflux conditions. The reaction solvent was evaporated in vacuo and the product (3) was re-suspended in dioxane. NaOH (1N) was slowly added and stirred for 2 hours. The reaction solvent was evaporated in vacuo and product (4) washed 3 times and re-suspended in dichloromethane. HCl (1N) was slowly added to acidify the product. Product 4 and the resin-bound peptide were mixed in HOBt/DIC/NMP for 4 hours, filtered, treated with trifluoroacetic acid, and cleaved from the resin by treatment with hydrofluoric acid. The peptide-estrogen conjugate was purified using reverse-phase HPLC and characterized by ESI mass spectrometry.

### Example 4

### Preparation of GLP-1/Estrogen(17-Carbamate)

[1123] A GLP-1 analog was synthesized using the Boc protocol disclosed in Example 1 with a Boc-Lys(Fmoc)-OH residue at the C-terminus. (The Fmoc group protecting the side chain amine on the lysine residue was removed with 20% piperidine/DMF for 30 minutes prior to the conjugation of the estrogen derivative). B-Estradiol 3-benzoate was derivatized at the 17-position by reaction with 4-nitrophenyl chloroformate. The derivatized estradiol with reacted with the C-terminal lysine of a GLP-1 analog to result in the GLP-1/Estrogen(17-Ester) conjugate, as shown below:

[chemical structure]

[1124] Specifically, β-estradiol 3-benzoate (1) and a 2-fold excess of 4-nitrophenyl chloroformate (2) were stirred together in pyridine, toluene, and DMAP under reflux conditions for 24 hours. The reaction solvent was evaporated in vacuo and the product, β-estradiol 17-nitrophenyl ester 3-benzoate (3), was resuspended in ethyl acetate. The reaction product was washed twice with aqueous HCl (0.01N) followed by a single wash with water. The ethyl acetate was evaporated in vacuo and the product (3) was precipitated with hexane. Product 3 and the resin-bound peptide were mixed in NMP/5% DIEA for 4 hours, filtered, treated with TFA, and cleaved from the resin by HF treatment. The peptide-estrogen conjugate was purified using reverse-phase HPLC and characterized by ESI mass spectrometry.

### Example 5

### Preparation of GLP-1/Estrogen(17-Ester)

[1125] A GLP-1 analog was synthesized using the Boc protocol disclosed in Example 1 with a Boc-Lys(Fmoc)-OH residue at the C-terminus. (The Fmoc group protecting the side chain amine on the lysine residue was removed with 20% piperidine/DMF for 30 minutes prior to the conjugation of the estrogen derivative). Estradiol was derivatized at the 17-position by reaction with succinic anhydride. The derivatized estradiol with reacted with the C-terminal lysine of a GLP-1 analog to result in the GLP-1/Estrogen(17-Ester) conjugate, as shown below:

[chemical structure]

[1126] Specifically, β-estradiol 17-acetate (1) and a 10-fold excess of succinic anhydride (2) were stirred together in DMF with 5% DIEA and DMAP for 48 hours at room temperature. After 48 hours, the reaction solvent was evaporated in vacuo and the product (3) was re-suspended in ethyl acetate. The reaction product (3) was washed with aqueous HCl (0.01N) two times followed by a single wash with water. The ethyl acetate was evaporated in vacuo and the product (3) was re-suspended in a mixture of MeOH/acetonitrile/water. The estrogen derivative product (3) was purified by reverse-phase HPLC. Lyophilized product (3) and the resin-bound peptide were mixed in HOBt/DIC/NMP for 4 hours, filtered, treated with TFA, and cleaved from the resin by HF treatment. The peptide-estrogen conjugate was purified using reverse-phase HPLC and characterized by ESI mass spectrometry.

### Example 6

### Preparation of GLP-1/Estrogen(3-Ester)

[1127] A GLP-1 analog was synthesized using the Boc protocol disclosed in Example 1 with a Boc-Lys(Fmoc)-OH residue at the C-terminus. (The Fmoc group protecting the side chain amine on the lysine residue was removed with 20% piperidine/DMF for 30 minutes prior to the conjugation of the estrogen derivative). Estradiol 17-acetate was derivatized at the 3-position by reaction with succinic anhydride. The derivatized estradiol with reacted with the C-terminal lysine of the GLP-1 analog to result in the GLP-1/Estrogen(3-Ester) conjugate, as shown below:

[chemical structure]

[chemical structure]

[1128] Specifically, β-estradiol 17-acetate (1) and a 10-fold excess of succinic anhydride (2) were stirred together in DMF with 5% DIEA and DMAP for 48 hours at room temperature. After 48 hours, the reaction solvent was evaporated in vacuo and the product (3) was re-suspended in ethyl acetate. The reaction product (3) was washed with aqueous HCl (0.01N) two times followed by a single wash with water. The ethyl acetate was evaporated in vacuo and the product (3) was re-suspended in a mixture of MeOH/acetonitrile/water. The estrogen derivative product (3) was purified by reverse-phase HPLC. Lyophilized product (3) and the resin-bound peptide were mixed in HOBt/DIC/NMP for 4 hours, filtered, treated with TFA, and cleaved from the resin by HF treatment. The peptide-estrogen conjugate was purified using reverse-phase HPLC and characterized by ESI mass spectrometry.

### Example 7

### Preparation of GLP-1/Estrone 3-Ester)

[1129] A GLP-1 analog was synthesized using the Boc protocol disclosed in Example 1 with a Boc-Lys(Fmoc)-OH residue at the C-terminus. (The Fmoc group protecting the side chain amine on the lysine residue was removed with 20% piperidine/DMF for 30 minutes prior to the conjugation of the estrogen derivative). Estrone was derivatized at the 3-position by reaction with succinic anhydride. The derivatized estrone was with reacted with the C-terminal lysine of the GLP-1 analog to result in the GLP-1/Estrone(3-Ester) conjugate, as shown below:

[chemical structure]

[chemical structure]

[1130] Specifically, estrone (1) and a 10-fold excess of succinic anhydride (2) were stirred together in DMF with 5% DIEA and DMAP for 48 hours at room temperature. After 48 hours, the reaction solvent was evaporated in vacuo and the product (3) was re-suspended in ethyl acetate. The reaction product (3) was washed with aqueous HCl (0.01N) two times followed by a single wash with water. The ethyl acetate was evaporated in vacuo and the product (3) was re-suspended in a mixture of MeOH/acetonitrile/water. The estrone derivative product (3) was purified by reverse-phase HPLC. Lyophilized product (3) and the resin-bound peptide were mixed in HOBt/DIC/NMP for 4 hours, filtered, treated with TFA, and cleaved from the resin by HF treatment. The peptide-estrogen conjugate was purified using reverse-phase HPLC and characterized by ESI mass spectrometry.

### Example 8

### Preparation of GLP-1/Estrogen(17-Hydrazone)

[1131] A GLP-1 analog was synthesized using the Boc protocol disclosed in Example 1. The peptide was synthesized using Boc-based in situ neutralization chemistry with a Boc-Cys(4-MeBzl)-OH residue at the C-terminus to facilitate the addition of estrogen. Estrone was derivatized at the 17-position by reaction with maleimidocaproic acid hydrazide. The derivatized estrone was with reacted with the C-terminal cysteine of the GLP-1 analog to result in the GLP-1/Estradiol(17-Hydrazone) conjugate, as shown below:

[chemical structure]

[1132] Specifically, equimolar amounts of estrone (1) and ε-maleimidocaproic acid hydrazide (2) were stirred together in MeOH with 0.1% TFA for 4 hours at room temperature. After 4 hours, the reaction solvent was evaporated in vacuo and the product (3) was precipitated in cold ether and purified on a silica column. A 5-fold excess of product 3 was mixed with the cleaved and purified peptide in a mixture of DMF, ACN, Tris, and water at pH 7.5 for 24 hours at room temperature to generate the peptide-estrogen conjugate. The peptide-estrogen conjugate was purified using reverse-phase HPLC and characterized by ESI mass spectroscopy.

### Example 9

### Preparation of GLP-1/Estrogen(17-Carbamate Disulfide) (Hindered and Unhindered)

[1133] A GLP-1 analog was synthesized using the Boc protocol disclosed in Example 1. The peptide was synthesized using Boc-based in situ neutralization chemistry with a Boc-Cys(4-MeBzl)-OH residue (to result in an unhindered disulfide conjugate) or a Boc-Pen(4-MeBzl)-OH residue (to result in a hindered disulfide conjugate) at the C-terminus to facilitate the addition of estrogen. B-Estradiol 3-benzoate was derviatized at the 17-position by reaction with 4-nitrophenyl chloroformate. The intermediate was then reacted with pyridyldithio-ethylamine-HCl and subjected to a disulfide exchange reaction to with the C-terminal cysteine of the GLP-1 analog to result in the GLP-1/Estradiol(17-Carbamate Disulfide) conjugate, as shown below:

[chemical structure]

[1134] First, equimolar amounts of Aldrithiol-2 (1) and 2-mercaptoethylamine HCl (2) were stirred together in MeOH with 2% AcOH for 48 hours at room temperature. After 48 hours, the reaction solvent was evaporated in vacuo and the product (3) was precipitated in cold ether. Second, β-estradiol 3-benzoate (4) and a 2-fold excess of 4-nitrophenyl chloroformate (5) were stirred together in pyridine, toluene, and DMAP under reflux conditions for 4 hours. The reaction solvent was evaporated in vacuo and the product, β-estradiol 17-nitrophenyl ester 3-benzoate (6), was resuspended in ethyl acetate. This reaction product was washed twice with aqueous HCl (0.01N) followed by a single wash with water, which were removed in a separatory funnel. The ethyl acetate was evaporated in vacuo and the product (6) was precipitated with hexane.

[chemical structure]

[chemical structure]

[1135] Equimolar amounts of pyridyldithio-ethylamine HCl (3) and β-estradiol 17-nitrophenyl ester 3-benzoate (6) were stirred together in pyridine with 5% DIEA and DMAP for 48 hours at room temperature. After 48 hours, the reaction solvent was evaporated in vacuo and the product (7) was resuspended in ethyl acetate. This reaction product was washed twice with aqueous HCl (0.01N) followed by a single wash with water, and the ethyl acetate was evaporated in vacuo. The 3-benzoate group on product (7) was removed by treatment with 0.25% K₂CO₃ in dioxane and methanol for 3 hours at room temperature to generate the product β-estradiol 17-carbamate S—S—NPy (8), which was purified on a silica column A 5-fold excess of product 8 was mixed with the cleaved and purified peptide (with either a cysteine residue or a penicillamine residue at position 40) in NMP and Tris at pH 7.5 for 48 hours at room temperature to generate the peptide-estrogen conjugate. The peptide-estrogen conjugate was purified using reversed-phase HPLC and characterized by ESI mass spectroscopy

### Example 10

### Preparation of GLP-1/Estrogen(17-Cathepsin Diaminoethane)

[1136] A GLP-1 analog was synthesized using the Boc protocol disclosed in Example 1. The peptide was synthesized using Boc-based in situ neutralization chemistry with a Z-His(BOM)—OH residue at the N-terminus, and a Boc-Lys(Fmoc)-OH at the C-terminus to facilitate the addition of the dipeptide spacer and estrogen. B-Estradiol 17-nitrophenyl ester benzoate was derviatized at the 17-position to result in the GLP-1/Estradiol(17-Cathespsin Diaminoethane) conjugate, as shown below:

[chemical structure]

[chemical structure]

[1137] Fmoc-Phy-Lys(Cl—Z)—OH (1) was synthesized utilizing Fmoc-base in situ neutralization chemistry on a Wang resin, and cleaved from the resin with TFA/DCM. Equimolar amounts of Fmoc-Phe-Lys(Cl—Z)—OH (1) and Boc-ethylenediamine (2) were stirred together in HOBt, DIC, and DCM for 4 hours at room temperature. This reaction product was washed twice with aqueous HCl (0.01N) followed by a single wash with water, which were removed in a separatory funnel, and the ethyl acetate was evaporated in vacuo. After the washing steps, the reaction product was treated with 20% piperidine in DMF for 30 minutes to remove the N-terminal Fmoc group to generate NH₂-Phe-Lys(Cl—Z)-EDA-Boc (3), which was precipitated in cold ether after removal of the piperidine/DMF solvent in vacuo. NH₂-Phe-Lys(Cl—Z)-EDA-Boc (3) was stirred with a 2-fold excess of succinic anhydride (4) in DMF, 5% DIEA, and DMAP for 16 hours at room temperature, after which the reaction solvent was evaporated in vacuo and resuspended in MeOH, acetonitrile, and water. The reaction product, hemisuccinate-Phe-Lys(Cl—Z)-EDA-Boc (5), was purified by reverse phase HPLC. A 5-fold excess of lyophilized product (5) and the resin-bound peptide were mixed in HOBt/DIC/NMP for 16 hours, filtered, and treated with TFA to generate the product GLP-1+hemisuccinate-Phe-Lys(Cl—Z)-EDA (6). This resin-bound product (6) was mixed with a 5-fold excess of β-estradiol 17-nitrophenyl ester 3-benzoate (7) in NMP/5% DIEA for 16 hours, filtered, and cleaved from the resin by HF treatment to generate the final product (8). The peptide-estrogen conjugate was purified using reversed-phase HPLC and characterized by ESI mass spectroscopy.

### Example 11

### Preparation of GLP-1/Cholesterol 3-Amide)

[1138] A GLP-1 analog was synthesized using the Boc protocol disclosed in Example 1. The peptide was synthesized using Boc-based in situ neutralization chemistry with a Boc-Lys(Fmoc)-OH residue at the C-terminus Cholesterol 3-carboxylic acid was reacted at the with the C-terminal lysine of the GLP-1 analog to result in the GLP-1/Cholesterol(3-Amide) conjugate, as shown below:

[chemical structure]

[1139] Specifically, cholesterol 3-carboxylic acid (1) and the resin-bound peptide were mixed in HOBt/DIC/NMP for 16 hours, filtered, treated with TFA, and cleaved from the resin by HF treatment. The Fmoc group protecting the side chain amine on the lysine residue was removed with 20% piperidine/DMF for 30 minutes prior to the addition of product 4. The peptide-cholesterol conjugate (2) was purified using reversed-phase HPLC and characterized by ESI mass spectrometry. If the peptide backbone was PEGylated, then a cysteine residue was added at position 24 in the sequence to facilitate the addition of the PEG moiety, which was added to the peptide-cholesterol conjugate by mixing equimolar amounts of iodoacetyl 40 k PEG with the conjugate in a 7M urea/0.05 M Tris buffer at pH 8.5 for 1 hour.

### Example 12

### Estrogen Receptor Binding Assay

### Phospholmager Protocol w/ Purified ERα & Millipore Filter Plate

[1140] The following reagents were used to perform the estrogen receptor binding assay: Ligand Binding Buffer (pH 7.6), 50 mM HEPES-Sodium salt, 1 mM CaCl₂, 5 mM MgCl₂, 0.5% BSA, Sucrose Cushion (pH 7.6), 20% Sucrose, 120 mM NaCl, 40 mM Tris-HCl, 0.4% BSA, Polyethyleneimine (PEI), and 0.25% PEI.

[1141] Titration of “Cold” Estradiol

[1142] A stock dilution of cold estradiol at 5-fold higher concentration then the highest desired test concentration was prepared. The highest concentration that was tested is 10 μM. Thus, a stock of 50 μM was prepared with a total volume of 500 μl. Exactly 40 μl of binding buffer was added to each well of a titration plate, excluding columns 11 and 12. Exactly 60 μl of the stock concentration was added to each well of column 11 of the titration plate. A 3-fold titration was performed by transferring 20 μl from column 11 to column 10 and mixing. Each subsequent column through column 1 was titrated. Exactly 20 μl was transferred from each well of the titration plate to the corresponding wells on the assay plate. Exactly 20 μl of binding buffer was added to the “total binding” wells (wells 12(A-D)). Exactly 20 μl of 100 μM of cold estradiol was added to the “non-specific binding” wells (wells 12(E-H)).

[1143] Constant Concentration of “Hot” Estradiol

[1144] A stock solution of labeled estradiol was prepared at a 5-fold higher concentration then the desired test concentration, which is 0.05 nM. Thus, a stock of 0.25 nM labeled estradiol was prepared with at least a total volume of 2.3 mL. The labeled estradiol comes in solution at 10 uCi at a volume of 100 μl, which correlates to a concentration of 45.45 nM using the conversion of 2200 Ci/mmol For 2.3 mL of a 0.25 nM stock, 12.65 μL of the labeled estradiol was added to 2.29 ml of binding buffer. Exactly 20 μL of stock solution was added to each well of the assay plate according to design.

[1145] Titration of Purified Estrogen Receptor Alpha

[1146] The purified estrogen receptor was tested at a concentration of 1.5 nM. Because 60 μL of estrogen receptor was added to each well, a stock concentration that was 1.667 times higher was prepared. For a test concentration of 1.5 nM, a stock concentration of 2.5 nM was prepared. A volume of 7.0 mL of 2.5 nM receptor was prepared by adding 8.4 μL of the stock to 6.99 mL of binding buffer. Exactly 60 μL of the receptors was then transferred to the appropriate wells in the assay plate.

[1147] Assay

[1148] The assay plate (containing cold ligand, hot ligand, and cell lysates) was incubated at room temperature for 2 hours. Exactly 25 μL of 0.25% PEI was added to each well of the filter plate. The filter plate was allowed to incubate for 20 minutes before clearing the wells by vacuum. Exactly 80 μL of the suspensions in the assay plate was transferred to the PEI-coated filter plate. The samples were vacuumed through the filter plate using the vacuum manifold. The filter plates were washed plates several times with binding buffer and then wrapped in cellophane. The plates were secured on the surface of the phosphor-imaging screen with the well bottoms closest to the screen. The phosphor-imaging screen and plate was placed in a radio film bag and exposed for 48 hours. The imaging screen was scanned using the phosphoimager and the exposure file was collected.

### Example 13

[1149] Mice (db/db, N=6, average initial body weight=54 g) were subcutaneously injected once per day for four weeks with vehicle or 40 or 400 μg/kg of one of the following:

[1150] (a) GLP-1(Aib²A²²CexK⁴⁰) (400 μg/kg-day),

[1151] (b) GLP-1(Aib²A²²CexK⁴⁰)/Estrogen(17-ester) (40 μg/kg-day), or

[1152] (c) GLP-1(Aib²A²²Cex⁴⁰)/Estrogen(17-ester) (400 μg/kg-day).

[1153] Body weight was measured after 23 days and the change in body weight was determined (FIG. 2a). Mice that were administered a high dose of the GLP-1(Aib²A²²Cex⁴⁰)/Estrogen(17-ester) conjugate experienced a greater decrease in body weight then mice that were administered GLP-1 alone.

[1154] The effect of the GLP-1(Aib²A²²CexK⁴⁰)/Estrogen(17-ester) conjugate on cumulative food intake over a period of 23 days was also determined. Mice that were administered a high dose of the GLP-1(17-ester)/Estrogen(17-ester) conjugate consumed less food than those that were administered GLP-1 alone.

[1155] FIGS. 2b and 2c show the effect of the GLP-1(Aib²A²²CexK⁴⁰)/Estrogen(17-ester) conjugate on blood glucose levels (mg/dL). Mice that were administered a high dose of the GLP-1(Aib²A²²CexK⁴⁰)/Estrogen(17-ester) conjugate experienced the greatest decrease in blood glucose levels between days 0 and 14.

### Example 14

### In Vivo Effects of GLP-1/Estrogen Conjugates

[1156] Diet-induced obesity (DIO) mice (N=8, 6 mice per group, average initial body weight=58 g) were subcutaneously injected once per day for four weeks with vehicle or 4, 40, or 400 μg/kg of one of the following:

[1157] (a) GLP-1(Aib²E¹⁶Cex⁴⁰) (40 μg/kg-day),

[1158] (b) GLP-1(Aib²A²²CexK⁴⁰) (400 μg/kg-day), or

[1159] (c) GLP-1(Aib²A²²CexK⁴⁰)/Estrogen(17-ester) (4, 40, or 400 μg/kg-day).

[1160] A saline solution comprising 25% (v/v) glucose was injected at a dose of 1.5 g/kg of body weight at the 0 min time point on days 7 and 21. Blood glucose was measured at the 0, 15, 30, 60, and 120 min time points on day 7 and day 21 (FIG. 3a).

[1161] Body weight was measured after 23 days and the change in body weight, change in fat mass, and change in lean muscle mass were determined (FIGS. 3b-d). Mice that were administered a high dose of the GLP-1(Aib²A²²CexK⁴⁰)/Estrogen(17-ester) conjugate experienced the greatest decrease in body weight and fat mass, and the least amount of lean muscle mass loss.

[1162] The effect of the GLP-1(Aib²A²²CexK⁴⁰)/Estrogen(17-ester) conjugate on cummulative food intake over a period of 23 days was also determined. Mice that were administered a high dose of the GLP-1(Aib²A²²CexK⁴⁰)/Estrogen(17-ester) consumed the least amount of food.

[1163] FIG. 3e shows the effect of the GLP-1(Aib²A²²CexK⁴⁰)/Estrogen(17-ester) conjugate on the change blood glucose. Mice that were administered a high dose of the GLP-1(Aib²A²²CexK⁴⁰)/Estrogen(17-ester) conjugate experienced the greatest decrease in blood glucose levels between days 0 and 14. These results demonstrate the added dose dependent efficacy of adding estrogen to a weak A22-based GLP-1 agonist.

### Example 15

[1164] Diet-induced obesity (DIO) mice (N=8, average initial body weight=59 g) were subcutaneously injected once per day for four weeks with vehicle or one of the following:

[1165] (a) GLP-1(Aib²E¹⁶Cex K⁴⁰) (40 or 400 μg/kg-day),

[1166] (b) GLP-1(Aib²E¹⁶Cex K⁴⁰)/Estrogen (17-ester) (40 or 400 μg/kg-day), or

[1167] (c) GLP-1(Aib²E¹⁶Cex K⁴⁰)/Estrogen(3-ether) (40 or 400 μg/kg-day).

[1168] A saline solution comprising 25% (v/v) glucose was injected at a dose of 1.5 g/kg of body weight at the 0 min time point on day 14. Blood glucose levels were measured at the 0, 15, 30, 60, and 120 min time points. FIG. 4a presents data from this experiment.

[1169] Body weight was measured after 21 days and the change in total body weight and fat mass were determined (FIGS. 4b-c). Mice that were administered a high dose of the GLP-1/Estrogen conjugates experienced the greatest decrease in total body weight (FIG. 4b). Fat mass was decreased in the high dose estrogen ether conjugate relative to vehicle-treated animals (FIG. 4c). The ester conjugates had a greater effect on total body weight than the ether conjugates, and the ether conjugates had a greater effect on fat mass than the ester conjugates.

[1170] The effect of the GLP-1(Aib²E¹⁶Cex K⁴⁰)/Estrogen conjugates on cumulative food intake over a period of 21 days was also determined Mice that were administered a GLP-1/Estrogen conjugate consumed less food than mice that were administered GLP-1(Aib²E¹⁶Cex K⁴⁰) alone.

[1171] FIG. 4d shows the effect of the GLP-1(Aib²E¹⁶Cex K⁴⁰)/Estrogen conjugates on blood glucose levels (mg/dL). At a high dose, mice that were administered either GLP-1 (Aib²E¹⁶Cex K⁴⁰)/Estrogen conjugate experienced a greater change in blood glucose levels between days 0 and 21 than mice that were administered GLP-1(Aib²E¹⁶Cex K⁴⁰) alone.

### Example 16

[1172] Mice (N=8, 11 months old, average body weight 60 g) that were on a diabetic diet for 9 months were subcutaneously injected with vehicle or one of the following:

[1173] (a) GLP-1(Aib²E¹⁶Cex K⁴⁰) (40 or 400 μg/kg/day),

[1174] (b) GLP-1(Aib²E¹⁶Cex K⁴⁰)/Estrogen(3-ether) (40 or 400 μg/kg-day),

[1175] (c) dGLP-1(A¹Aib²A²²Cex K⁴⁰)/Estrogen(3-ether) (40 or 400 μg/kg-day),

[1176] (d) GLP-1(Aib²E¹⁶C²⁴(PEG-40 kDa)Cex K⁴⁰)/Estrogen (3-ether) (40, 400 μg/kg-day),

[1177] (e) GLP-1(Aib²E¹⁶C²⁴(PEG-40 kDa)Cex K⁴⁰)/Estrogen (3-ether) (40 μg/kg-week), or

[1178] (f) GLP-1(Aib²E¹⁶C²⁴(PEG-40 kDa)Cex K⁴⁰) (40 μg/kg-week).

[1179] Body weight was measured after 7 days and the change in body weight was determined (FIG. 5a). Mice that were administered a high dose of the GLP-1/Estrogen conjugates experienced the greatest decrease in body weight, however mice that were administered the low daily dose of the GLP-1/Estrogen conjugates also experienced significant decrease in body weight.

[1180] The effect of the GLP-1(Aib²E¹⁶K⁴⁰Cex)/Estrogen(3-ether), dGLP-1(A¹Aib²A²²Cex K⁴⁰)/Estrogen(3-ether), and GLP-1(Aib²E¹⁶C²⁴ (PEG-40 kDa)Cex K⁴⁰)/Estrogen (3-ether) conjugates on cumulative food intake over a period of 7 days was also determined. Mice that were administered either high or low doses of GLP-1(Aib²E¹⁶K⁴⁰Cex)/Estrogen(3-ether) and GLP-1(Aib²E¹⁶K⁴⁰Cex) or the low daily dose of GLP-1(Aib²E¹⁶C²⁴(PEG-40 kDa)Cex K⁴⁰) consumed the least amount of food.

[1181] FIG. 5b shows the effect of the GLP-1(Aib²E¹⁶K⁴⁰Cex)/Estrogen(3-ether), dGLP-1(A¹Aib²A²²Cex K⁴⁰)/Estrogen(3-ether), and GLP-1(Aib²E¹⁶C²⁴(PEG-40 kDa)Cex K⁴⁰)/Estrogen (3-ether) conjugates on the change in blood glucose levels (mg/dL). Mice that were administered either high or low doses of GLP-1(Aib²E¹⁶K⁴⁰Cex) experienced the greatest change in blood glucose, along with that of the high dose GLP-1(Aib²E¹⁶K⁴⁰Cex)/estrogen(3-ether).

### Example 17

[1182] Diet-induced obesity (DIO) mice (N=8, average initial body weight=65 g) were subcutaneously injected once per day for one week with vehicle or 40 μg/kg one of the following:

[1183] (a) GLP-1(Aib²E¹⁶Cex K⁴⁰),

[1184] (b) dGLP-1(A¹Aib²A²²Cex K⁴⁰),

[1185] (c) GLP-1(Aib²A²² Cex K⁴⁰),

[1186] (d) GLP-1(Aib²E¹⁶Cex K⁴⁰)/Estrogen(3-ether),

[1187] (e) dGLP-1(A¹Aib²A²²Cex K⁴⁰)/Estrogen(3-ether),

[1188] (f) GLP-1(Aib²A²²Cex K⁴⁰)/Estrogen(3-ether),

[1189] (g) GLP-1(Aib²E¹⁶Cex K⁴⁰)/Estrogen(17-ester)

[1190] (h) dGLP-1(A¹Aib²A²²Cex K⁴⁰)/Estrogen(17-ester), or

[1191] (i) GLP-1(Aib²A²²Cex K⁴⁰)/Estrogen(17-ester).

[1192] Body weight was measured after 7 days and the change in body weight and the fat mass were determined (FIG. 6a-b). Mice that were administered either estrogen conjugate experienced the greatest decrease in total body weight. The analysis of fat mass (FIG. 6b) was relatively constant with total loss in body weight.

[1193] FIG. 6c shows the effect of the GLP-1/Estrogen conjugates on the change in blood glucose (mg/dL). Mice that were administered a GLP-1(Aib²E¹⁶K⁴⁰Cex)/Estrogen(3-ether) or a GLP-1(Aib²E¹⁶K⁴⁰Cex)/Estrogen(17-ester) conjugate experienced the greatest change in blood glucose between days 0 and 7.

### Example 18

[1194] Mice (N=8, 11 months old, average body weight 60 g) that were on a diabetic diet for 9 months were administered subcutaneous injections once per day for one week with vehicle or 400 μg/kg of one of the following:

[1195] (a) GLP-1(Aib²E¹⁶Cex K″),

[1196] (b) GLP-1(Aib²E¹⁶Cex K⁴⁰)/Estrogen(3-ether),

[1197] (c) GLP-1(Aib²E¹⁶Cex K⁴⁰)/Estrogen(17-ester),

[1198] (d) dGLP-1(A¹Aib²A²²Cex K⁴⁰),

[1199] (e) dGLP-1(A¹Aib²A²²Cex K⁴⁰)/Estrogen(3-ether),

[1200] (f) dGLP-1(A¹Aib²A²²Cex K⁴⁰)/Estrogen(17-ester),

[1201] (g) GLP-1(Aib²A²²Cex K⁴⁰),

[1202] (h) GLP-1(Aib²A²²Cex K⁴⁰)/Estrogen(3-ether), or

[1203] (i) GLP-1(Aib²A²²Cex K⁴⁰)/Estrogen(17-ester)

[1204] Body weight was measured after 7 days and the change in body weight was determined (FIG. 7a). Mice that were administered the GLP-1(Aib²A²²Cex K⁴⁰)/Estrogen conjugates experienced the greatest decrease in total body weight. GLP-1/Estrogen conjugates showed greater body weight reduction in vivo than the corresponding GLP-1 peptides that were not conjugated to estrogen.

[1205] The effect of the GLP-1/Estrogen conjugates on cumulative food intake over a period of 7 days was also determined. Mice that were administered the GLP-1(Aib²A²²Cex K⁴⁰)/Estrogen conjugates consumed the least amount of food.

[1206] FIG. 7b shows the effect of the GLP-1/Estrogen conjugates on changes in blood glucose (mg/dL). Mice that were administered the GLP-1(Aib²A²²Cex K⁴⁰)/Estrogen conjugates experienced the greatest change in blood glucose between days 0 and 7.

[1207] Neither the A22 or the d-amino acid containing peptides demonstrated much lowering relative to the GLP-1(Aib²E¹⁶Cex K⁴⁰)/Estrogen conjugates. Additionally, the estrogen conjugates of GLP-1(Aib²E¹⁶Cex K⁴⁰) were clearly more effective than the non-estrogen form of the same peptide.

### Example 19

[1208] Mice (N=8, average body weight 55 g) were administered subcutaneous injections once per day for one week with vehicle or one of the following:

[1209] (a) GLP-1(Aib²E¹⁶Cex K⁴⁰) (120 or 400 μg/kg-day),

[1210] (b) GLP-1(Aib²E¹⁶Cex K⁴⁰)/Estrogen(3-ester) (120 or 400 μg/kg-day),

[1211] (c) dGLP-1(A¹Aib²A²²Cex K⁴⁰) (400 or 1200 μg/kg-day), or

[1212] (d) dGLP-1(A¹Aib²A²²Cex K⁴⁰)/Estrogen(3-ester) (400 or 1200 μg/kg-day).

[1213] The d-amino acid containing peptides were clearly inferior in all measures of efficacy to the 1-amino acid containing peptides. Body weight was measured after 7 days and the change in body weight was determined (FIG. 8a). There was little apparent difference in body weight lowering at these doses for the peptides with and without the estrogen.

[1214] FIG. 8b shows the effect of the various GLP-1/Estrogen conjugates on changes in blood glucose levels (mg/dL). Mice that were administered the GLP-1(Aib²E¹⁶ Cex K⁴⁰)/Estrogen(3-ester) conjugate experienced the greatest change in blood glucose levels between days 0 and 7 in vivo, far more than the animals treated with the same peptide but without estrogen. This demonstrated the direct improvement in blood glucose independent of a difference in body weight.

[1215] FIG. 8c illustrates the effect of the administration of the indicated GLP-1 conjugates on change in fat mass.

### Example 20

[1216] Diet induced obesity mice (DIO) (N=8, average body weight 61 g) were administered subcutaneous injections once per day for one or two weeks with vehicle or 40, 400, 1200, or 4000 μg/kg of one of the following:

[1217] (a) GLP-1(Aib²E¹⁶Cex K⁴⁰)/Estrogen(3-ether) (40 μg/kg-day),

[1218] (b) dGLP-1(A¹Aib²A²²Cex K⁴⁰) (4000 μg/kg-day),

[1219] (c) dGLP-1(A¹Aib²A²²Cex K⁴⁰)/Estrogen(3-ester) (400, 1200, 4000 μg/kg-day),

[1220] (d) GLP-1(Aib²E¹⁶C²⁴(PEG-40 kDa)Cex K⁴⁰) (40 μg/kg-day),

[1221] (e) GLP-1(Aib²E¹⁶C²⁴(PEG-40 kDa)Cex K⁴⁰)/Estrogen(3-ether) (40 μg/kg-day), or

[1222] (f) GLP-1(Aib²E¹⁶C²⁴(PEG-40 kDa)Cex K⁴⁰)/Cholesterol (40 μg/kg-day).

[1223] Body weight was measured after 7 days and the change in body weight was determined Mice that were administered the GLP-1/Estrogen(3-ester) conjugate experienced the greatest decrease in body weight (FIG. 9a) and the least amount of fat mass (FIG. 9b).

[1224] The effect of the GLP-1/Estrogen(3-ester) conjugates on cumulative food intake over a period of 7 days was also determined Mice that were administered a GLP-1(Aib²E¹⁶Cex K⁴⁰)/Estrogen(3-ester) conjugate (without PEG) consumed significantly less food than mice that were administered GLP-1 alone.

[1225] FIG. 9c shows the effect of the GLP-1/Estrogen(3-ester) conjugates on the change in blood glucose. There was clear dose dependent glucose lowering in the d-amino acid containing GLP-1/Estrogen(3-ester) conjugate between days 0 and 7 and enhanced at the highest dose relative to mice that were administered GLP-1 alone (FIG. 9c)

### Example 21

[1226] Mice (N=8, 14 months old) that were on a diabetic diet were subcutaneously injected once a day for one week with vehicle or one of the following:

[1227] (a) d-GLP-1(A¹Aib²A²²Cex K⁴⁰)/Estrogen(3-ester) (1200, 4000 μg/kg),

[1228] (b) d-GLP-1(A¹Aib²A²²Cex K⁴⁰)/Estrogen(3-ether) (1200, 4000 μg/kg), or

[1229] (c) d-GLP-1(Aib²E¹⁶K⁴⁰Cex) (4000 μg/kg),

[1230] Body weight was measured after 7 days and the change in body weight was determined (FIG. 10a). Mice that were administered the d-amino acid containing GLP-1/Estrogen conjugates where the estrogen was covalently linked as either a stable amide or ester that was unstable in vivo. The animals treated with the unstable ester conjugate experienced the greatest decrease in total body weight.

[1231] The effect of the GLP-1/estrogen conjugates on cumulative food intake over a period of 7 days was also determined. Mice that were administered the unstable ester conjugate consumed significantly less food than mice that were administered the remaining conjugates.

[1232] The effect of the GLP-1/estrogen conjugates on the change in blood glucose levels (mg/dL) was also determined. FIG. 10b illustrates that mice administered the d-amino acid containing GLP-1/Estrogen ester conjugate experienced a greater change in blood glucose levels between days 0 and 7 than mice that were administered a comparable d-amino acid containing peptide but with a stable estrogen conjugate.

### Example 22

### In Vitro Receptor Assays of Active GLP-1/Estrogen Conjugates

[1233] Serial dilutions of the following compounds were prepared:

[1234] (i) estradiol,

[1235] (ii) GLP-1,

[1236] (iii) an active, estrogen-stable GLP-1/Estrogen(3-ether) conjugate,

[1237] (iv) an active, estrogen-labile GLP-1/Estrogen(3-ester) conjugate,

[1238] (v) an active, estrogen-stable GLP-1/Estrogen(17-ester) conjugate,

[1239] (vi) an active, metastable, acid-labile GLP-1/Estrogen(17-hydrazone) conjugate,

[1240] (vii) an active, metastable, thiol reduction-labile GLP-1/Estrogen(17-carbamate disulfide) conjugate, and

[1241] (viii) an active, activated estrogen-labile GLP-1/Estrogen(3-ester, 17-OAc).

[1242] GLP-1 Activity (cAMP induction)—The serial dilutions of (ii), (iii), and (iv) were incubated with HEK293 cells co-transfected with the GLP-1 receptor and the luciferase gene fused to the cAMP response element (CRE). Luminescence was measured after cell lysis and incubation with luciferin. Results, shown in the below table, demonstrate that conjugation of GLP-1 to an estrogen does not influence GLP-1's inherent activity at the GLP-1 receptor.

[1243] GLP-1 Binding—The serial dilutions of (ii), (iii), and (iv) were incubated with GLP-1 receptor cell membrane extracts, [I125]-GLP-1, and agglutinin-coated SPA beads prior to scintillation measurement. Results, shown in the below table, demonstrate that conjugation of GLP-1 to an estrogen does not influence GLP-1's binding at the GLP-1 receptor.

| | GLP-1 | GLP-1 |
|---|---|---|
| Conjugate | EC₅₀ (nM) | IC₅₀ (nM) |
| GLP-1 | 0.011 ± 0.002 | 0.381 ± 0.043 |
| GLP-1/Estrogen(3-ether) | 0.012 ± 0.003 | 0.717 ± 0.135 |
| GLP-1/Estrogen(3-ester) | 0.014 ± 0.001 | 0.627 ± 0.046 |

[1244] Estrogen Activity—The serial dilutions of (i), (iii), and (iv) were incubated with T47D cells transfected with the luciferase gene fused to the estrogen response element (ERE). Luminescence was measured after cell lysis and incubation with luciferin. Results, shown in the below table, indicate that the stable attachment of estrogen to GLP-1 significantly reduces estrogen's intracellular estrogenic activity, while the labile conjugate demonstrates a high degree of intracellular estrogenic activity.

[1245] ERα Binding—The serial dilutions of (i), (iii), and (iv) were incubated with purified ERα and [I125]-estradiol. Following filtration, radio ligand binding was quantified by phosphor-imaging. Results, shown in the below table, indicate that the stable attachment of estrogen to GLP-1 significantly reduces estrogen's ability to bind to the estrogen receptor, while the labile conjugate demonstrates estrogen receptor binding, which is a function of the instability of the ester conjugate under the conditions of bioassay.

| | ERα | ERα |
|---|---|---|
| Conjugate | EC₅₀ (nM) | IC₅₀ (nM) |
| Estradiol | 0.004 ± 0.001 | 12.01 ± 1.832 |
| GLP-1/Estrogen(3-ether) | 108.2 ± 15.73 | 1200 ± 301.1 |
| GLP-1/Estrogen(3-ester) | 0.013 ± 0.001 | 198.0 ± 16.75 |

[1246] GLP-1 Activity (cAMP induction)—The serial dilutions of (ii), (iii), (iv), (v), (vi), (vii), and (viii) were incubated with HEK293 cells co-transfected with the GLP-1 receptor and the luciferase gene fused to the cAMP response element (CRE). Luminescence was measured after cell lysis and incubation with luciferin. The active, metastable GLP-1/estrogen conjugates were equally active at the GLP-1 receptor (FIG. 11a).

[1247] Estrogen Activity—The serial dilutions of (i), (iii), (iv), (v), (vi), (vii), and (viii) were incubated with T47D cells transfected with the luciferase gene fused to the estrogen response element (ERE). Luminescence was measured after cell lysis and incubation with luciferin. The active, metastable GLP-1/estrogen conjugates had variable activity at the estrogen receptor (FIG. 11b). When these active, metastable conjugates are purposefully treated with, for example, acid, thiol, or an enzyme (e.g., cathepsin), the metastable GLP-1/estrogen conjugates return to nearly full estrogen potency. Thus, the active, metastable GLP-1/estrogen conjugates exhibit reduced estrogenic activity as a covalent conjugate and require release to be active.

### Example 23

### In Vitro Receptor Assays of Inactive GLP-1/Estrogen Conjugates

[1248] Serial dilutions of the following compounds were prepared:

[1249] (i) inactive GLP-1,

[1250] (ii) an inactive, estrogen-stable GLP-1/Estrogen(3-ether) conjugate, and

[1251] (iii) an inactive, estrogen-labile GLP-1/Estrogen(3-ester) conjugate.

[1252] GLP-1 Activity (cAMP induction)—The serial dilutions of (i), (ii), and (iii) were incubated with HEK293 cells co-transfected with the GLP-1 receptor and the luciferase gene fused to the cAMP response element (CRE). Luminescence was measured after cell lysis and incubation with luciferin. Results are shown in the below table.

| | GLP-1 |
|---|---|
| Conjugate | EC₅₀ (nM) |
| Active GLP-1 | 0.028 ± 0.001 |
| Inactive GLP-1 (d-amino acid containing) | 480.5 ± 12.76 |
| Inactive GLP-1 (d-amino acid containing)/ | 562.2 ± 26.87 |
| Estrogen(3-ester) | |
| Inactive GLP-1 (d-amino acid containing)/ | 418.3 ± 16.75 |
| Estrogen(3-ether) | |

### Example 24

[1253] Diet induced obesity mice (DIO) (N=8, average body weight 51 g) were administered subcutaneous injections once per day for two weeks with vehicle or 400 or 4000 μg/kg of one of the following:

[1254] (a) d-amino acid containing GLP-1(A¹Aib²E¹⁶K⁴⁰Cex) (4000 μg/kg),

[1255] (b) d-amino acid containing GLP-1(A¹Aib²A²²Cex K⁴⁰)/Estrogen(3-ester) (400, 4000 μg/kg), or

[1256] (c) d-amino acid containing GLP-1(A¹Aib²A²²Cex K⁴⁰)/Estrogen (3-ether) (400, 4000 μg/kg).

[1257] Body weight was measured after 15 days and the change in body weight was determined Mice that were administered the inactive, estrogen-labile d-amino acid containing GLP-1/Estrogen(3-ester) conjugate experienced the greatest decrease in body weight, with the effect more pronounced at a high dose (FIG. 12a).

[1258] The effect of inactive GLP-1 and the inactive GLP-1/Estrogen conjugates on cumulative food intake over a period of 15 days was also determined. Mice that were administered the inactive, estrogen-labile d-amino acid containing GLP-1/Estrogen(3-ester) conjugate consumed significantly less food than mice that were administered inactive GLP-1 alone or an inactive, estrogen-stable d-amino acid containing GLP-1/Estrogen(3-ether) conjugate, with the effect more pronounced at a high dose (FIG. 12b).

[1259] FIG. 12c shows the effect of inactive GLP-1 and the inactive d-amino acid containing GLP-1/Estrogen conjugates on the change in blood glucose. A high dose of inactive d-amino acid containing GLP-1/Estrogen(3-ester) conjugate lowered blood glucose between days 0 and 14.

[1260] Liver weight was measured after 15 days and the change in liver weight was determined Mice that were administered the estrogen-labile, inactive d-amino acid containing GLP-1/Estrogen(3-ether) conjugate experienced a greater decrease in liver weight than mice that were administered the estrogen-stable, inactive d-amino acid containing GLP-1/Estrogen(3-ester) conjugate (FIG. 12d).

[1261] Uterus weight was measured after 15 days and the change in uterus weight was determined Mice that were administered the inactive, estrogen-labile d-amino acid containing GLP-1/Estrogen(3-ester) conjugate experienced a significantly greater increase in uterus weight than mice that were administered inactive GLP-1 alone or the inactive, estrogen-stable d-amino acid containing GLP-1/Estrogen(3-ether) conjugate (FIG. 12e).

### Example 25

[1262] C57BI/6 mice (N=8, average body weight 19.6 g) on a standard chow diet were ovariectomized and allowed 5 days for recovery prior to subcutaneous administration injections once per day for 7 days with vehicle or 4000 μg/kg of one of the following:

[1263] (a) GLP-1 agonist,

[1264] (b) d-amino acid containing GLP-1(A¹Aib²A²²Cex K⁴⁰)/Estrone(3-ester),

[1265] (c) d-amino acid containing GLP-1(A¹Aib²A²²Cex K⁴⁰)/Estrogen(3-ether), or

[1266] (d) GLP-lagonist/Estrogen(3-ether).

[1267] Mice were sacrificed at the end of the study and the uterus was collected and weighed.

[1268] Body weight was measured after 7 days and the change in body weight was determined Mice that were administered the active, estrogen-stable GLP-1 agonist/Estrogen(3-ether) conjugate experienced a greater decrease in body weight than mice that were administered the active, GLP-1 agonist alone (FIG. 13a), the inactive, estrogen-labile d-amino acid containing GLP-1/Estrone(3-ester) conjugate, or the inactive, estrogen-stable d-amino acid containing GLP-1/Estrogen(3-ether) conjugate. Mice that were administered the GLP-1 agonist, the inactive, estrogen-labile d-amino acid containing GLP-1/Estrone(3-ester) conjugate, and the active, estrogen-stable GLP-1 agonist/Estrogen(3-ether) conjugate exhibited a decrease in fat mass (FIG. 13b).

[1269] The effect of the GLP-1 conjugates on cumulative food intake over a period of 7 days was also determined Mice that were administered the active, estrogen-stable GLP-1 agonist/Estrogen(3-ether) conjugate consumed less food than mice that were administered the active, GLP-1 agonist alone, the inactive, estrogen-labile d-amino acid containing GLP-1/Estrone(3-ester) conjugate, or the inactive, estrogen-stable d-amino acid containing GLP-1/Estrogen(3-ether) conjugate (FIG. 13c).

[1270] FIG. 13d shows the effect of the GLP-1 conjugates on the change in blood glucose. Mice that were administered the inactive, estrogen-labile inactive d-amino acid containing GLP-1/Estrone(3-ester) conjugate or the active, stable GLP-1 agonist/Estrogen(3-ether) conjugate experienced a decrease in blood glucose levels greater than vehicle. Mice that were administered the inactive, estrogen-stable d-amino acid containing GLP-1/Estrogen(3-ether) conjugate did not exhibit a decrease in blood glucose levels.

[1271] Uterus weight was measured after 7 days and the change in uterus weight was determined Mice that were administered the inactive, estrogen-labile d-amino acid containing GLP-1/Estrone(3-ester) conjugate experienced a significantly greater increase in uterus weight than mice that were administered GLP-1 alone, the inactive, estrogen-stable d-amino acid containing GLP-1/Estrogen(3-ether) conjugate, or the active, estrogen-stable GLP-1/Estrogen(3-ether) conjugate (FIG. 13e).

### Example 26

[1272] Mice (N=8, average body weight 19.1 g) on a standard chow diet were ovariectomized and allowed 5 days for recovery prior to subcutaneous administration injections once per day for 7 days with vehicle or 4000 μg/kg of one of the following:

[1273] (a) GLP-1 agonist/Estrone(3-ester),

[1274] (b) GLP-1 agonist/Estrogen(17-carbamate disulfide),

[1275] (c) GLP-1 agonist/Estrogen(17-hydrazone), or

[1276] (d) GLP-1 agonist/Estrogen(17-cathepsin).

[1277] Mice were sacrificed at the end of the study and the uterus was collected and weighed.

[1278] Body weight was measured after 7 days and the change in body weight was determined Mice that were administered the metastable GLP-1 agonist/Estrogen conjugates experienced a greater decrease in body weight and fat mass than mice that were administered the active, GLP-1 agonist alone or the active, estrogen-labile GLP-1 agonist/Estrone(3-ester) conjugate (FIGS. 14a and 14b). Mice that were administered the metastable enzyme- and acid-labile conjugates, GLP-1 agonist/Estrogen(17-cathepsin) and GLP-1 agonist/Estrogen(17-hydrazone), respectively, initially had the greatest decrease in body weight, while the metastable thiol reduction-labile conjugate, GLP-1 agonist/Estrogen(17-carbamate disulfide), exhibited the overall greatest decrease in body weight over the 7 day study.

[1279] FIG. 14c shows the effect of the metastable GLP-1 conjugates on the change in blood glucose. Mice that were administered the metastable thiol reduction- and acid-labile conjugates, GLP-1 agonist/Estrogen(17-carbamate disulfide) and GLP-1 agonist/Estrogen(17-hydrazone), respectively, experienced a greater decrease in blood glucose levels over the course of the study than the labile GLP-1 agonist/Estrone(3-ester) conjugate.

[1280] Uterus weight was measured after 7 days and the change in uterus weight was determined Mice that were administered the estrogen-labile GLP-1/Estrone(3-ester) conjugate experienced a significantly greater increase in uterus weight than mice that were administered metastable GLP-1/Estrogen conjugates (FIG. 14d).

### Example 27

[1281] Diet induced obesity mice were administered subcutaneous injections once per day for two weeks with vehicle or 40 or 400 μg/kg of one of the following:

[1282] (a) GLP-1 agonist,

[1283] (b) GLP-lagonist/Estrogen(3-ester), or

[1284] (c) GLP-lagonist/Estrogen(3-ether).

[1285] Body weight was measured after 15 days and the change in body weight was determined Mice that were administered the active, estrogen-stable GLP-1 agonist/Estrogen(3-ether) conjugate experienced a significantly greater decrease in body weight than mice that were administered the active, GLP-1 agonist alone or the active, estrogen-labile GLP-1 agonist/Estrogen(3-ester) conjugate (FIG. 15a).

[1286] The effect of active GLP-1 and the active GLP-1/Estrogen conjugates on cumulative food intake over a period of 15 days was also determined. Mice that were administered the active, estrogen-stable GLP-1 agonist/Estrogen(3-ether) conjugate consumed significantly less food than mice that were administered the active, GLP-1 agonist alone or the active, estrogen-labile GLP-1 agonist/Estrogen(3-ester) conjugate (FIG. 15b).

### Example 28

### Stability Analysis of GLP-1/Estrogen Conjugates

[1287] Peptide conjugates (1 mg/mL) were incubated in 100% human plasma at pH 7.4 and 37° C. Aliquots were withdrawn and plasma proteins were precipitated and removed by micro-centrifugation. The aliquots were analzed by HPLC and MS, as described in Example 1. The active estrogen-stable GLP-1/Estrogen(3-ether) conjugates (e.g., Example 3) exhibited no estrogen release over 72 hours, while the active estrogen-labile GLP-1/Estrogen(3-ester) conjugates (e.g., Example 6) showed substantial estrogen release after 3 hours and complete estrogen release within 6 hours (FIG. 16a). The acid-labile conjugate, GLP-1/Estrogen(17-hydrazone) (e.g., Example 7) exhibited no estrogen release in plasma over 48 hours at physiological pH, but released estrogen within 3 hours upon exposure to acid (pH 5.0), with complete estrogen release occurring within 6 hours (FIG. 16b). The unhindered thiol reduction-labile conjugate (e.g., Example 9) showed substantial estrogen release after 24 hours and complete estrogen release within 48 hours, while the hindered thiol reduction-labile conjugate, GLP-1/Estrogen(17-carbamate disulfide) (e.g., Example 9), exhibited no estrogen release in plasma over 72 hours (FIG. 16c). This hindered thiol reduction-labile conjugate also exhibited no estrogen release at an extracellular concentration of glutathione (e.g., 15 μM), but released estrogen within 6 hours at an intracellular glutathione concentration of 15 mM (FIG. 16d). The enzyme-labile GLP-1/Estrogen(cathepsin) conjugate (e.g., Example 10) exhibited no estrogen release in plasma over 72 hours (FIG. 16e).

### Example 29

[1288] Diet-induced obesity mice were administered subcutaneous injections once per day for seven days with vehicle or 400 μg/kg of one of the following:

[1289] (a) GLP-1 agonist,

[1290] (b) GLP-lagonist/Estrogen(3-ether),

[1291] (c) GIP agonist,

[1292] (d) GIP agonist/Estrogen(3-ether),

[1293] (e) Glucagon agonist, or

[1294] (f) Glucagon agonist/Estrogen(3-ether).

[1295] Body weight was measured after 7 days and the change in body weight was determined (FIG. 17a). Mice that were administered the GLP-1 agonist/Estrogen(3-ether) conjugate experienced the greatest decrease in body weight, and a significantly greater decrease in body weight than mice that were administered the GLP-1 agonist alone. Mice that were administered the GIP agonist alone and the GIP agonist/Estrogen(3-ether) conjugate showed similar decreases in body weight. Mice that were administered the GIP agonist and the GIP agonist/Estrogen(3-ether) conjugate exhibited a greater decrease in body weight than mice that were administered vehicle. Mice that were administered the glucagon agonist alone and the glucagon agonist/Estrogen(3-ether) conjugate showed similar decreases in body weight. The decrease in body weight of mice that were administered the glucagon agonist or the glucagon agonist/Estrogen(3-ether) conjugate was similar to the decrease in body weight in mice that were administered vehicle. Without intending to be bound by any particular theory, peptides that target the GLP-1 receptor show superior ability to target estrogen to cell(s) where it can make a meaningful difference on body weight. In this experiment, conjugates to GLP-1 active peptides (GLP-1 agonists) performed better with respect to reducing body weight than peptides that primarily target the GIP or glucagon receptors (GIP agonists or glucagon agonists).

[1296] The effect of the conjugates on cumulative food intake was also determined (FIG. 17b). Mice that were administered the estrogen conjugates of GLP-1, GIP, and glucagon consumed less food than mice that were administered the GLP-1 agonist, GIP agonist, or glucagon agonist, respectively. Mice that were administered the GLP-lagonist/Estrogen(3-ether) conjugate consumed the least amount of food over the 7 day period.

[1297] The effect of the conjugates on the change in blood glucose was also determined Mice that were administered the GLP-1 agonist and the GLP-1 agonist/Estrogen(3-ether) conjugate both showed a decrease in blood glucose levels over 7 days, with the decrease greater in mice that were administered the conjugate. Mice that were administered the GIP agonist and the GIP agonist/Estrogen(3-ether) conjugate also showed a decrease in blood glucose levels over 7 days. Mice that were administered the glucagon agonist showed an increase in blood glucose levels over 7 days, while mice that were administered the glucagon agonist/Estrogen(3-ether) conjugate showed a decrease in blood glucose levels over 7 days (FIG. 17c).

### Example 30

[1298] Diet-induced obesity wild type mice, estrogen receptor beta knock-out (ERβ KO) mice, and estrogen receptor alpha knock-out (ERα KO) mice were administered subcutaneous injections once per day for two weeks with vehicle or 400 μg/kg of one of the following:

[1299] (a) GLP-1 agonist, or

[1300] (b) GLP-lagonist/Estrogen(3-ether).

[1301] Body weight was measured after 14 days and the change in body weight was determined (FIG. 18a). Wild type mice that were administered the GLP-1 agonist/Estrogen(3-ether) conjugate showed a greater decrease in body weight over mice that were administered vehicle or the GLP-1 agonist. Wild type mice that were administered vehicle showed about a 10% increase in body weight over the two week period, about a 3% increase in body weight when administered the GLP-1 agonist, and about a 10% decrease in body weight when administered the GLP-1 agonist/Estrogen(3-ether) conjugate. ERα KO mice that were administered the GLP-1 agonist/Estrogen(3-ether) conjugate showed a greater decrease in body weight than when administered vehicle or the GLP-1 agonist. ERα KO mice showed no change in body weight when administered vehicle, about a 10% decrease in body weight when administered the GLP-1 agonist, and about a 20% decrease in body weight when administered the GLP-1 agonist/Estrogen(3-ether) conjugate. ERβ KO mice that were administered the GLP-1 agonist/Estrogen(3-ether) conjugate showed a similar decrease in body weight than mice that were administered the GLP-1 agonist. ERβ KO mice showed about a 2% decrease in body weight when administered vehicle, and about a 15% decrease in body weight when administered either the GLP-1 agonist or the GLP-1 agonist/Estrogen(3-ether) conjugate. Without intending to be bound by any particular theory, these data suggest that the ERβ receptor is responsible for an additional lowering of body weight. When the ERβ receptor is knocked out, the mice do not show a difference in body weight lowering between the GLP-1 agonist and the GLP-1 agonist/Estrogen(3-ether) conjugate.

[1302] The effect of the GLP-1 conjugates on cumulative food intake in the wild type mice and the knock-out mice was also determined (FIG. 18b). The knock-out mice that were administered the GLP-1 agonist/Estrogen(3-ester) conjugate consumed the least amount of food.

[1303] The effect of the GLP-1 conjugates on the change in blood glucose in the wild type mice and the knock-mice was also determined. ERα KO mice that were administered the GLP-1 agonist/Estrogen(3-ester) conjugate showed the greatest decrease in blood glucose levels (FIG. 18c).

### Example 31

[1304] Male db/db mice with blood glucose levels of 500 mg/dl were administered a subcutaneous dose of vehicle or 50 nmol/kg of one of the following:

[1305] (a) GLP-1 agonist,

[1306] (b) GLP-lagonist/Estrogen(3-ether), or (c) GLP-lagonist/Estrogen(3-ester).

[1307] Mice that were administered the GLP-1 agonist showed the least effective lowering of blood glucose over 48 hours (except for vehicle), while mice that were administered the estrogen-stable GLP-lagonist/Estrogen(3-ether) conjugate showed the most effective decrease in blood glucose over 48 hours (FIG. 19).

[1308] The results of the above experiments were consistent when a streptozotocin (STZ)-induced diabetes model, a model of type I diabetes, was used.

### Example 32

### GLP-1 Agonist/Dexamethasone Carbamate-β-Alanine Conjugate

[1309] This example demonstrates a solid phase coupling of dexamethasone to a GLP-1 agonist with a carbamate-β-alanine linker, as shown below and in FIG. 20.

[chemical structure]

[chemical structure]

[1310] Dexamethasone was coupled with 4-nitrophenyl chloroformate in pyridine to yield the [21-(4-nitrophenylformate)]dexamethasone. The [21-(4-nitrophenylformate)]dexamethasone was directly coupled with the tert-butyl ester of β-alanine without intermediate purification to obtain [21-(N-carbonyl-β-alanine tert-butyl ester)]dexamethasone. [21-(N-carbonyl-β-alanine tert-butyl ester)]dexamethasone was then treated with 70% TFA in dichloromethane (DCM) to obtain the [21-(N-carbonyl-β-alanine)]dexamethasone, which had a molecular weight of 508.2 (M+H⁺) (determined by ESI-MS).

[1311] The peptidyl resin composed of a GLP-1 analog sequence (HaibEGTFTSDVSSYLEEQAAKEFIAWLVKGGPSSGAPPPSK) was synthesized by Fmoc-chemistry using a Rink MBHA amide resin. The C-terminal Lys residue was coupled as Fmoc-Lys(Mtt)-OH. After removing the Mtt with 1% TFA/T is/DCM, the peptidyl resin was coupled with [21-(N-carbonyl-β-alanine)]dexamethasone using DEPBT in DMF/DIEA. The peptide dexamethasone conjugate was cleaved from the resin using a cleavage-cocktail that consisted of 85% TFA, 5% phenol, 5% water and 5% Tis. The peptide conjugate was purified by RP-HPLC with 0.1% TFA/acetonitrile/water. The purified GLP-1 analog dexamethasone conjugate was analyzed by analytical RP-HPLC and characterized by MALDI-TOF mass spectrometry, with molecular weight of 4680.5 (corresponding to the calculated MW 4680.0). The resulting peptide conjugate had 40 amino acids, a molecular weight of 4680, and a theoretical pI of 4.96 (depicted below and in FIG. 21).

[chemical structure]

### Example 33

### GLP-1 Agonist/Dexamethasone Hydrazine Conjugate

[1312] Dexamethasone was reacted with maleimidocaproic acid hydrazide monohydrochloride in 1% TFA/methanol to obtain the [3-(Maleimidocaproic acid hydrazide)-ylidene]dexamethasone of molecular weight of 600.3 (M−H⁺) in ESI-MS, as shown below and in FIG. 22.

[chemical structure]

[1313] A GLP-1 analog sequence that possessed a single free thiol was synthesized by Fmoc-chemistry on Rink MBHA amide resin (HaibEGTFTSDVSSYLEEQAAKEFIAWLVKGGPSSGAPPPSC). The thiol-maleimido alkylation of the GLP-1 analog peptide with [Maleimidocaproic acid hydrazide-3-ylidene]dexamethasone (1.5 fold excess) was done in 50% acetonitrile aqueous solution with 1M Tris base adjusted pH to 8. The peptide conjugate was purified by RP-HPLC with 0.1% TFA/acetonitrile/water. The purified GLP-1 analog dexamethasone conjugate was analyzed by analytical RP-HPLC and characterized by ESI-MS. The molecular weight of the conjugate was 4764±1.5, which corresponds to the calculated MW 4766.5. The resulting peptide conjugate is pictured below and in FIG. 23. The peptide had 40 amino acids, a molecular weight of 4766, and a theoretical pI of 4.96.

[chemical structure]

### Example 34

[1314] The activities of the peptide conjugates in Examples 32 and 33 at the glucocorticoid receptor were tested in the luciferase reporter gene assay using two clones of HeLa cells (ATCC #CCL-2) transfected with murine mammary tumor virus long terminal repeat-driven firefly luciferase. The results are shown in FIG. 24. Both conjugates retained a significant amount of agonist activity at the glucocorticoid receptor in both reporter clones, though not to the degree of unconjugated dexamethasone. This example illustrates that dexamethosone can be conjugated to a GLP-1 analog and retain a significant degree of agonist activity at the glucocorticoid receptor.

### Example 35

### GLP-1 Agonist/Dexamethasone Carbamate Conjugate

[1315] This example demonstrates a solid phase coupling of dexamethaxone to a GLP-1 agonist peptide with a carbamate linker, depicted below.

[chemical structure]

[chemical structure]

[1316] Dexamethasone was coupled with 4-nitrophenyl chloroformate in pyridine with catalytic DMAP in 2 hours at room temperature to yield [21-(4-nitrophenylformate)]dexamethasone. The [21-(4-nitrophenylformate)]dexamethasone was directly coupled with the peptidyl resin without purification.

[1317] The peptidyl resin composed of a GLP-1 analog sequence (HaibEGTFTSDVSSYLEEQAAKEFIAWLVKGGPSSGAPPPSK) was synthesized by Fmoc-chemistry using a Rink MBHA amide resin. The C-terminal Lys residue was coupled as Fmoc-Lys(Mtt)-OH. After removing the Mtt with 1% TFA/T is/DCM, the peptidyl resin was coupled with [21-(4-nitrophenylformate)]dexamethasone in pyridine/DMF for about 16 hours. The peptide dexamethasone conjugate was cleaved from the resin using a cleavage-cocktail that consisted of 85% TFA, 5% phenol, 5% water and 5% Tis. The peptide conjugate was purified by RP-HPLC with 0.1% TFA/acetonitrile/water eluent. The purified GLP-1 analog dexamethasone conjugate was analyzed by analytical RP-HPLC and characterized by MALDI-TOF mass spectrometry. The peptide conjugate had a molecular weight of 4608.2, which corresponds to the calculated MW 4609.0. The GLP-1 agonist/dexamethasone carbamate conjugate is depicted below.

[chemical structure]

### Example 36

### GLP-1 Agonist/Dexamethasone Disulfide Conjugates

[1318] This example demonstrates a method of conjugating dexamethasone to a GLP-1 agonist peptide via disulfide linker, as shown below.

[chemical structure]

[1319] Dexamethasone was coupled with 4-nitrophenyl chloroformate in pyridine to yield the [21-(4-nitrophenylformate)]dexamethasone. The [21-(4-nitrophenylformate)]dexamethasone was directly coupled with the 2-(2-pyridyldithio)ethylamine hydrochloride in pyridine/DIEA, without intermediate purification, to obtain [21-(N-carbonyl-2-(2-pyridyldithio) ethylamine]dexamethasone. The reaction buffer was diluted with 10% AcOH/10% ACN and injected into a C8 reverse-phase column to purify the product by 0.1% TFA/acetonitrile/water solvent. The purified product of [21-(N-carbonyl-2-(2-pyridyldithio) ethylamine]dexamethasone was characterized by ESI-MS. The product had a molecular weight of 605.22 (M+H)⁺, which corresponds to the calculated MW 604.75.

[1320] A GLP-1 analog sequence that possessed a single free thiol was synthesized by Fmoc-chemistry on Rink MBHA amide resin (HaibEGTFTSDVSSYLEEQAAKEFIAWLVKGGPSSGAPPPSC). For the procedure of disulfide formation between the thiol peptide and the dexamethasone intermediate, the thiol peptide was dissolved in 70% acetonitrile aqueous solution with 1M Tris base adjusted pH to 8, mixed with 2-fold excess of [21-(N-carbonyl-2-(2-pyridyldithio)ethylamine]dexamethasone dissolved in DMF, and stirred at room temperature for about 4 h. The reaction buffer was diluted with 10% AcOH/10% ACN and purified by RP-HPLC with 0.1% TFA/acetonitrile/water eluent. The purified GLP-1 analog dexamethasone conjugate was analyzed by analytical RP-HPLC and characterized by MALDI-TOF mass spectrometry. The conjugate had a molecular weight of 4658.1, which corresponds to the calculated MW 4658.5.

[1321] Other disulfide linker conjugates, such as [Aib2, E16]GLP-1-CEX-homoCys40(S—SCH2CH2NHCO—O-DEX) and [Aib2, E16]GLP-1-CEX-Pen40(S—SCH2CH2NHCO—O-DEX), were synthesized as described above. However, instead of using a GLP-1 peptide with a single, free thiol, a peptide havine either homocysteine and penicillamine at position 40 was used.

[1322] Example GLP-1 agonist/dexamethasone conjugates with three different types of disulfide linkers (cysteine, penicillamine, and homocysteine) are depicted below.

[chemical structure]

### Example 37

[1323] The activities of the peptide conjugates in Examples 35 and 36 at the GLP-1 receptor and at the glucocorticoid receptor were tested in the luciferase reporter gene assay using two clones of HeLa cells (ATCC #CCL-2) transfected with murine mammary tumor virus long terminal repeat-driven firefly luciferase, as described in Example 34. The results are shown in FIGS. 25 and 26.

[1324] All conjugates retained a significant amount of agonist activity at the glucocorticoid receptor in both reporter clones, though not to the degree of unconjugated dexamethasone. Of the conjugates tested, the [Aib2, E16]GLP-1-CEX-Lys40(NHCO—O-DEX) conjugate retained the greatest amount of activity at the glucocorticoid receptor. The [Aib2, E16]GLP-1-CEX-homoCys40(S—SCH2CH2NHCO—O-DEX) peptide is expected to have similar GLP-1 receptor agonist activity compared to the other peptides tested. This example illustrates that dexamethasone can be conjugated to a GLP-1 analog and retain a significant degree of agonist activity at the glucocorticoid receptor.

The application's sequence listing, which the Patent Office published only in electronic form, follows.

SEQUENCE LISTING (1674 sequences)

SEQ ID NO: 1 - protein, 29 aa, Homo sapiens
HSQGTFTSDYSKYLDSRRAQDFVQWLMNT

SEQ ID NO: 2 - protein, 29 aa, Artificial Sequence
  Synthetic Glucagon Analogue
  MOD_RES (16)..(16): Glu, Gln, homoglutamic acid or homocysteic acid
  MOD_RES (17)..(17): Arg, Cys, Orn, homocysteine or acetyl phenylalanine
  MOD_RES (27)..(27): Met, Leu or Nle
HSQGTFTSDYSKYLDXXRAQDFVQWLXNT

SEQ ID NO: 3 - protein, 29 aa, Artificial Sequence
  Synthetic Glucagon Analogue
  MOD_RES (16)..(16): Glu, Gln, homoglutamic acid or homocysteic acid
  MOD_RES (21)..(21): Asp, Cys, Orn, homocysteine or acetyl phenyalanine
  MOD_RES (27)..(27): Met, Leu or Nle
HSQGTFTSDYSKYLDXRRAQXFVQWLXNT

SEQ ID NO: 4 - protein, 29 aa, Artificial Sequence
  Synthetic Glucagon Analogue
  MOD_RES (16)..(16): Glu, Gln, homoglutamic acid or homocysteic acid
  MOD_RES (24)..(24): Gln, Cys, Orn, homocysteine or acetyl phenylalanine
  MOD_RES (27)..(27): Met, Leu or Nle
HSQGTFTSDYSKYLDXRRAQDFVXWLXNT

SEQ ID NO: 5 - protein, 29 aa, Artificial Sequence
  Synthetic Glucagon Analogue
  MOD_RES (16)..(16): Glu, Gln, homoglutamic acid or homocysteic acid
  MOD_RES (21)..(21): Asp, Cys, Orn, homocysteine or acetyl phenyalanine
  MOD_RES (24)..(24): Gln, Cys, Orn, homocysteine or acetyl phenyalanine
  MOD_RES (27)..(27): Met, Leu or Nle
HSQGTFTSDYSKYLDXRRAQXFVXWLXNT

SEQ ID NO: 6 - protein, 29 aa, Artificial Sequence
  Synthetic Glucagon Analogue
  MOD_RES (21)..(21): Asp, Cys, Orn, homocysteine or acetyl phenyalanine
  MOD_RES (27)..(27): Met, Leu or Nle
HSQGTFTSDYSKYLDERRAQXFVQWLXNT

SEQ ID NO: 7 - protein, 29 aa, Artificial Sequence
  Synthetic Glucagon Analogue
  MOD_RES (24)..(24): Gln, Cys, Orn, homocysteine or acetyl phenylalanine
  MOD_RES (27)..(27): Met, Leu or Nle
HSQGTFTSDYSKYLDERRAQDFVXWLXNT

SEQ ID NO: 8 - protein, 29 aa, Artificial Sequence
  Synthetic Glucagon Analogue
  MOD_RES (16)..(16): Glu, Gln, homoglutamic acid or homocysteic acid
HSQGTFTSDYSKYLDXRRAQDFVQWLMNT

SEQ ID NO: 9 - protein, 29 aa, Artificial Sequence
  Synthetic Glucagon Analogue
  MOD_RES (27)..(27): Met, Leu or Nle
HSQGTFTSDYSKYLDERRAQDFVQWLXNT

SEQ ID NO: 10 - protein, 29 aa, Artificial Sequence
  Synthetic Glucagon Analogue
HSQGTFTSDYSKYLDERRAQDFVQWLMNT

SEQ ID NO: 11 - protein, 29 aa, Artificial Sequence
  Synthetic Glucagon Analogue
  MISC_FEATURE: c-term amidation
HSQGTFTSDYSKYLDERRAQDFVQWLMNT

SEQ ID NO: 12 - protein, 29 aa, Artificial Sequence
  Synthetic Glucagon Analogue
  MISC_FEATURE (12)..(16): Lactam ring between side chains at position 12 and 16
HSQGTFTSDYSKYLDERRAQDFVQWLMNT

SEQ ID NO: 13 - protein, 29 aa, Artificial Sequence
  Synthetic Glucagon Analogue
  MISC_FEATURE (16)..(20): Lactam ring between side chains at positions 16 and 20
HSQGTFTSDYSKYLDERRAKDFVQWLMNT

SEQ ID NO: 14 - protein, 29 aa, Artificial Sequence
  Synthetic Glucagon Analogue
  MISC_FEATURE (22)..(24): Lactam ring between side chains at positions 22 and 24
HSQGTFTSDYSKYLDSRRAKDFVEWLMNT

SEQ ID NO: 15 - protein, 29 aa, Artificial Sequence
  Synthetic Glucagon Analogue
  MISC_FEATURE (24)..(28): Lactam ring formed between side chains at positions 24 and 28
HSQGTFTSDYSKYLDSRRAQDFVEWLMKT

SEQ ID NO: 16 - protein, 29 aa, Artificial Sequence
  Synthetic Glucagon Analogue
  MISC_FEATURE (12)..(16): Lactam ring between side chains at positions 12 and 16
  MISC_FEATURE (20)..(24): Lactam ring between side chains at positions 20 and 24
HSQGTFTSDYSKYLDERRAKDFVEWLMNT

SEQ ID NO: 17 - protein, 29 aa, Artificial Sequence
  Synthetic Glucagon Analogue
  MISC_FEATURE (16)..(20): Lactam ring between side chains at positions 16 and 20
  MISC_FEATURE (24)..(28): Lactam ring between side chains at positions 24 and 28
HSQGTFTSDYSKYLDERRADDFVEWLMKT

SEQ ID NO: 18 - protein, 29 aa, Artificial Sequence
  Synthetic Glucagon Analogue
  MISC_FEATURE (16)..(20): Lactam ring between side chains at positions 16 and 20
HSQGTFTSDYSKYLDERRAKDFVEWLMKT

SEQ ID NO: 19 - protein, 30 aa, Artificial Sequence
  Synthetic Glucagon Analogue
  MISC_FEATURE: c-term amidation
  MOD_RES (30)..(30): Variable amino acid
HSQGTFTSDYSKYLDERRAQDFVQWLMNTX

SEQ ID NO: 20 - protein, 29 aa, Artificial Sequence
  Synthetic Glucagon Analogue
  MOD_RES (16)..(16): Ser, Glu, Gln, homoglutamic acid or homocysteic acid
  MOD_RES (20)..(20): Gln, Lys, Arg, Orn or Citrulline
  MOD_RES (24)..(24): Gln or Glu
  MOD_RES (28)..(28): Asn, Asp or Lys
  MOD_RES (29)..(29): Thr or Gly
HSQGTFTSDYSKYLDXRRAXDFVXWLMXX

SEQ ID NO: 21 - protein, 29 aa, Artificial Sequence
  Synthetic Glucagon Analogue
  MISC_FEATURE: c-term amidation
  MOD_RES (2)..(2): Xaa is D-Ser, Ala, Gly, N-methyl Ser or AIB
HXQGTFTSDYSKYLDERRAQDFVQWLMNT

SEQ ID NO: 22 - protein, 29 aa, Artificial Sequence
  Synthetic Glucagon Analogue
  MISC_FEATURE: c-term amidation
  MOD_RES (2)..(2): Xaa is AIB
HXQGTFTSDYSKYLDERRAQDFVQWLMNT

SEQ ID NO: 23 - protein, 29 aa, Artificial Sequence
  Synthetic Glucagon Analogue
  MISC_FEATURE: c-term amidation
  MOD_RES (17)..(17): Cys-PEG
  MOD_RES (27)..(27): Met, Leu or Nle
HSQGTFTSDYSKYLDECRAQDFVQWLXNT

SEQ ID NO: 24 - protein, 29 aa, Artificial Sequence
  Synthetic Glucagon Analogue
  MISC_FEATURE: c-term amidation
  MOD_RES (21)..(21): Cys-PEG
  MOD_RES (27)..(27): Met, Leu or Nle
HSQGTFTSDYSKYLDERRAQCFVQWLXNT

SEQ ID NO: 25 - protein, 29 aa, Artificial Sequence
  Synthetic Glucagon Analogue
  MISC_FEATURE: c-term amidation
  MOD_RES (24)..(24): Cys-PEG
  MOD_RES (27)..(27): Met, Leu or Nle
HSQGTFTSDYSKYLDERRAQDFVCWLXNT

SEQ ID NO: 26 - protein, 10 aa, Artificial Sequence
  Synthetic peptide fragment representing the carboxy terminal 10 amino acids Exendin-4
GPSSGAPPPS

SEQ ID NO: 27 - protein, 8 aa, Artificial Sequence
  Synthetic peptide fragment representing the carboxy terminal 8 amino acids of oxyntomodulin
KRNRNNIA

SEQ ID NO: 28 - protein, 4 aa, Artificial Sequence
  Synthetic peptide
KRNR

SEQ ID NO: 29 - protein, 10 aa, Artificial Sequence
  Synthetic peptide fragment representing the carboxy terminal 10 amino acids of Exendin-4
  MISC_FEATURE: c-term amidation
GPSSGAPPPS

SEQ ID NO: 30 - protein, 39 aa, Artificial Sequence
  Synthetic Glucagon Analogue
  MOD_RES (27)..(27): Met, Leu or Nle
HSQGTFTSDYSKYLDERRAQDFVQWLXNTGPSSGAPPPS

SEQ ID NO: 31 - protein, 37 aa, Artificial Sequence
  Synthetic Glucagon Analogue
  MOD_RES (27)..(27): Met, Leu or Nle
HSQGTFTSDYSKYLDERRAQDFVQWLXNTKRNRNNIA

SEQ ID NO: 32 - protein, 33 aa, Artificial Sequence
  Synthetic Glucagon Analogue
  MOD_RES (27)..(27): Met, Leu or Nle
HSQGTFTSDYSKYLDERRAQDFVQWLXNTKRNR

SEQ ID NO: 33 - protein, 29 aa, Artificial Sequence
  Synthetic Glucagon Analogue
  MOD_RES (15)..(15): Asp, Glu, homoglutamic acid, cysteic acid or homocysteic acid
  MOD_RES (16)..(16): Ser, Glu, Gln, homoglutamic acid or homocysteic acid
  MOD_RES (20)..(20): Gln or Lys
  MOD_RES (24)..(24): Gln or Glu
  MOD_RES (28)..(28): Asn, Lys or an acidic amino acid
  MOD_RES (29)..(29): Thr, Gly or an acidic amino acid
HSQGTFTSDYSKYLXXRRAXDFVXWLMXX

SEQ ID NO: 34 - protein, 29 aa, Artificial Sequence
  Synthetic Glucagon Analogue
  MOD_RES (15)..(15): Asp, Glu, cysteic acid, homoglutamic acid or homocysteic acid
  MOD_RES (16)..(16): Ser, Glu, Gln, homoglutamic acid or homocysteic acid
  MOD_RES (20)..(20): Gln or Lys
  MOD_RES (24)..(24): Gln or Glu
  MOD_RES (28)..(28): Asn, Asp or Lys
  MOD_RES (29)..(29): Thr or Gly
HSQGTFTSDYSKYLDXRRAXDFVXWLMXX

SEQ ID NO: 35 - protein, 29 aa, Artificial Sequence
  Synthetic Glucagon Analogue
HSQGTFTSDYSKYLDSCRAQDFVQWLMNT

SEQ ID NO: 36 - protein, 39 aa, Artificial Sequence
  Synthetic Glucagon Analogue
HSQGTFTSDYSKYLDSRRAQDFVQWLMNTGPSSGAPPPS

SEQ ID NO: 37 - protein, 29 aa, Artificial Sequence
  Synthetic Glucagon Analogue
  MOD_RES (24)..(24): 2-butyrolactone bound through thiol group of Cys
HSQGTFTSDYSKYLDSRRAQDFVCWLMNT

SEQ ID NO: 38 - protein, 29 aa, Artificial Sequence
  Synthetic Glucagon Analogue
  MOD_RES (24)..(24): Carboxymethyl group bound through thiol group of Cys
HSQGTFTSDYSKYLDSRRAQDFVCWLMNT

SEQ ID NO: 39 - protein, 39 aa, Artificial Sequence
  Synthetic Glucagon Analogue
HSQGTFTSDYSRYLDSRRAQDFVQWLMNTGPSSGAPPPS

SEQ ID NO: 40 - protein, 29 aa, Artificial Sequence
  Synthetic Glucagon Analogue
  MISC_FEATURE: c-term amidation
  MOD_RES (15)..(15): Glu or Asp
  MOD_RES (28)..(28): Glu or Asp
HSQGTFTSDYSKYLXERRAQDFVQWLMXT

SEQ ID NO: 41 - protein, 29 aa, Artificial Sequence
  Synthetic Glucagon Analogue
  MISC_FEATURE: c-term amidation; lactam ring between side chains at positions 12 and 16
  MISC_FEATURE: c-term amidation
  MISC_FEATURE (12)..(16): Lactam ring between side chains at positions 12 and 16
  MOD_RES (15)..(15): Glu or Asp
  MOD_RES (28)..(28): Glu or Asp
HSQGTFTSDYSKYLXERRAQDFVQWLMXT

SEQ ID NO: 42 - protein, 29 aa, Artificial Sequence
  Synthetic Glucagon Analogue
  MISC_FEATURE: c-term amidation; lactam ring between side chains at positions 16 and 20
  MISC_FEATURE: c-term amidation
  MOD_RES (15)..(15): Glu or Asp
  MISC_FEATURE (16)..(20): Lactam ring between side chains at positions 16 and 20
  MOD_RES (28)..(28): Glu or Asp
HSQGTFTSDYSKYLXERRAKDFVQWLMXT

SEQ ID NO: 43 - protein, 29 aa, Artificial Sequence
  Synthetic Glucagon Analogue
  MISC_FEATURE: c-term amidation
  MOD_RES (15)..(15): Glu or Asp
  MISC_FEATURE (20)..(24): Lactam ring between side chains at positions 20 and 24
  MOD_RES (28)..(28): Glu or Asp
HSQGTFTSDYSKYLXSRRAKDFVEWLMXT

SEQ ID NO: 44 - protein, 29 aa, Artificial Sequence
  Synthetic Glucagon Analogue
  MISC_FEATURE: c-term amidation
  MOD_RES (15)..(15): Glu or Asp
  MISC_FEATURE (24)..(28): Lactam ring between side chains at positions 24 and 28
  MOD_RES (29)..(29): Glu or Thr
HSQGTFTSDYSKYLXSRRAQDFVEWLMKX

SEQ ID NO: 45 - protein, 29 aa, Artificial Sequence
  Synthetic Glucagon Analogue
  MOD_RES (12)..(12): Lys or Glu
  MOD_RES (15)..(15): Asp, Glu, homoglutamic acid, cysteic acid or homocysteic acid
  MOD_RES (16)..(16): Ser, Gln, Glu, Lys, homoglutamic acid, cysteic acid or homocysteic acid
  MOD_RES (20)..(20): Gln, Glu or Lys
  MOD_RES (24)..(24): Gln, Lys or Glu
  MOD_RES (28)..(28): Asn, Lys or an acidic amino acid
  MOD_RES (29)..(29): Thr, Gly or an acidic amino acid
HSQGTFTSDYSXYLXXRRAXDFVXWLMXX

SEQ ID NO: 46 - protein, 29 aa, Artificial Sequence
  Synthetic Glucagon Analogue
  MOD_RES (16)..(16): Ser, Glu, Gln, homoglutamic acid or homocysteic acid
  MOD_RES (20)..(20): Gln or Lys
  MOD_RES (24)..(24): Gln or Glu
HSQGTFTSDYSKYLDXRRAXDFVXWLMNT

SEQ ID NO: 47 - protein, 29 aa, Artificial Sequence
  Synthetic Glucagon Analogue
HSQGTFTSDYSKYLDERRAKDFVQWLMNT

SEQ ID NO: 48 - protein, 29 aa, Artificial Sequence
  Synthetic Glucagon Analogue
HSQGTFTSDYSKYLDSRRAKDFVEWLMNT

SEQ ID NO: 49 - protein, 29 aa, Artificial Sequence
  Synthetic Glucagon Analogue
HSQGTFTSDYSKYLDSRRAQDFVEWLMKT

SEQ ID NO: 50 - protein, 31 aa, Homo sapiens
HAEGTFTSDVSSYLEGQAAKEFIAWLVKGRG

SEQ ID NO: 51 - protein, 29 aa, Artificial Sequence
  Synthetic Glucagon Analogue
  MOD_RES (15)..(15): Asp, Glu, homoglutamic acid, cysteic acid or homocysteic acid
  MOD_RES (16)..(16): Ser, Glu, Gln, homoglutamic acid or homocysteic acid
  MOD_RES (20)..(20): Gln, Lys, Arg, Orn, or Citrulline
  MOD_RES (21)..(21): Asp, Glu, homoglutamic acid, or homocysteic acid
  MOD_RES (24)..(24): Gln or Glu
  MOD_RES (28)..(28): Asn, Lys or an acidic amino acid
  MOD_RES (29)..(29): Thr, Gly or an acidic amino acid
HSQGTFTSDYSKYLXXRRAXXFVXWLMXX

SEQ ID NO: 52 - protein, 30 aa, Artificial Sequence
  Synthetic peptide
  MISC_FEATURE: c-term amidation
HAEGTFTSDVSSYLEGQAAKEFIAWLVKGR

SEQ ID NO: 53 - protein, 29 aa, Artificial Sequence
  Synthetic Glucagon Analogue
  MOD_RES (3)..(3): Glu, Orn or Nle
  MOD_RES (15)..(15): Asp, Glu, homoglutamic acid, cysteic acid or homocysteic acid
  MOD_RES (16)..(16): Ser, Glu, Gln, homoglutamic acid or homocysteic acid
  MOD_RES (20)..(20): Gln or Lys
  MOD_RES (24)..(24): Gln or Glu
  MOD_RES (28)..(28): Asn, Lys or an acidic amino acid
  MOD_RES (29)..(29): Thr or an acidic amino acid
HSXGTFTSDYSKYLXXRRAXDFVXWLMXX

SEQ ID NO: 54 - protein, 29 aa, Artificial Sequence
  Synthetic Glucagon Analogue
  MOD_RES (17)..(17): Arg or Gln
  MOD_RES (18)..(18): Arg or Ala
  MOD_RES (21)..(21): Asp or Glu
  MOD_RES (23)..(23): Val or Ile
  MOD_RES (24)..(24): Gln or Ala
HSQGTFTSDYSKYLDEXXAKXFXXWLMNT

SEQ ID NO: 55 - protein, 29 aa, Artificial Sequence
  Synthetic Glucagon Analogue
  MOD_RES (1)..(1): His, D-His, (Des-amino)His, hydroxyl-His, acetyl-His, homo-His or alpha, alpha-dimethyl imidiazole acetic acid (DMIA), N-methyl His, alpha-methyl His, or imidazole acetic acid
  MOD_RES (2)..(2): Ser, D-Ser, Ala, D-Ala, Val, Gly, N-methyl Ser, AIB or N-methyl Ala
  MOD_RES (3)..(3): Gln, Glu, Orn or  Nle
  MOD_RES (10)..(10): Tyr or Trp
  MOD_RES (12)..(12): Lys, Citrulline, Orn or Arg
  MOD_RES (15)..(15): Asp, Glu, cysteic acid, homoglutamic acid and homocysteic acid
  MOD_RES (16)..(16): Ser, Glu, Gln, homoglutamic acid or homocysteic acid
  MOD_RES (17)..(17): Arg, Gln, Lys, Cys, Orn, homocysteine or acetyl phenylalanine
  MOD_RES (18)..(18): Arg, Ala, Lys, Cys, Orn, homocysteine or acetyl phenyalanine
  MOD_RES (20)..(20): Gln, Lys, Arg, Orn or Citrulline
  MOD_RES (21)..(21): Gln, Glu, Asp, Lys, Cys, Orn, homocystein or acetyl phenyalanine
  MOD_RES (23)..(23): Val or Ile
  MOD_RES (24)..(24): Ala, Gln, Glu, Lys, Cys, Orn, homocysteine or acetyl phenyalanine
  MOD_RES (27)..(27): Met, Leu or Nle
  MOD_RES (28)..(28): Asn, Arg, Citrulline, Orn, Lys or Asp
  MOD_RES (29)..(29): Thr, Gly, Lys, Cys, Orn, homocycsteine or acetyl phenyalanine
XXXGTFTSDXSXYLXXXXAXXFXXWLXXX

SEQ ID NO: 56 - protein, 29 aa, Artificial Sequence
  Synthetic Glucagon Analogue
  MOD_RES (1)..(1): His, D-His, (Des-amino)His, hydroxyl-His, acetyl-His, homo-His, DMIA, N-methyl His, alpha-methyl His, or imidazole acetic acid
  MOD_RES (2)..(2): Ser, D-Ser, Ala, D-Ala, Val, Gly, N-methyl Ser, AIB or N-methyl Ala
  MOD_RES (3)..(3): Gln, Glu, Orn or  Nle
  MOD_RES (15)..(15): Asp, Glu, cysteic acid, homoglutamic acid and homocysteic acid
  MOD_RES (16)..(16): Ser, Glu, Gln, homoglutamic acid or homocysteic acid
  MOD_RES (20)..(20): Gln, Lys, Arg, Orn or Citrulline
  MOD_RES (21)..(21): Gln, Glu, Asp, Cys, Orn, homocycstein or acetyl phenyalanine
  MOD_RES (23)..(23): Val or Ile
  MOD_RES (24)..(24): Ala, Gln, Glu, Cys, Orn, homocycsteine or acetyl phenyalanine
  MOD_RES (27)..(27): Met, Leu or Nle
  MOD_RES (28)..(28): Asn, Lys or Asp
  MOD_RES (29)..(29): Thr, Gly, Lys, Cys, Orn, homocycsteine or acetyl phenyalanine
XXXGTFTSDYSKYLXXRRAXXFXXWLXXX

SEQ ID NO: 57 - protein, 29 aa, Artificial Sequence
  Synthetic Glucagon Analogue
  MOD_RES (1)..(1): His, D-His, (Des-amino)His, hydroxyl-His, acetyl- His, homo-His, DMIA, N-methyl His, alpha-methyl His, or imidazole acetic acid
  MOD_RES (2)..(2): Ser, D-Ser, Ala, D-Ala, Val, Gly, N-methyl Ser, AIB or N-methyl Ala
  MOD_RES (3)..(3): Gln, Glu, Orn or  Nle
  MISC_FEATURE (12)..(16): Lactam ring between side changes at position 12 and 16
  MOD_RES (15)..(15): Asp, Glu, cysteic acid, homoglutamic acid and homocysteic acid
  MOD_RES (20)..(20): Gln, Lys, Arg, Orn or Citrulline
  MOD_RES (21)..(21): Gln, Glu, Asp, Cys, Orn, homocycsteine or acetyl phenyalanine
  MOD_RES (23)..(23): Val or Ile
  MOD_RES (24)..(24): Ala, Gln, Glu, Lys, Cys, Orn, homocysteine or acetyl Phe
  MOD_RES (27)..(27): Met, Leu or Nle
  MOD_RES (28)..(28): Asn, Lys or Asp
  MOD_RES (29)..(29): Thr, Gly, Lys, Cys, Orn, homocysteine or acetyl phenyalanine
XXXGTFTSDYSKYLXERRAXXFXXWLXXX

SEQ ID NO: 58 - protein, 29 aa, Artificial Sequence
  Synthetic Glucagon Analogue
  MOD_RES (1)..(1): His, D-His, (Des-amino)His, hydroxyl-His, acetyl-His, homo-His, DMIA, N-methyl His, alpha-methyl His, or imidazole acetic acid
  MOD_RES (2)..(2): Ser, D-Ser, Ala, D-Ala, Val, Gly, N-methyl Ser, AIB or N-methyl Ala
  MOD_RES (3)..(3): Gln, Glu, Orn or Nle
  MOD_RES (15)..(15): Asp, Glu, cysteic acid, homoglutamic acid or homocysteic acid
  MISC_FEATURE (16)..(20): Lactam ring between side chains at positions 16 and 20
  MOD_RES (21)..(21): Gln, Glu, Asp, Lys, Cys, Orn, homocysteine or acetyl phenyalanine
  MOD_RES (23)..(23): Val or Ile
  MOD_RES (24)..(24): Ala, Gln, Glu, Lys, Cys, Orn, homocysteine or acetyl phenyalanine
  MOD_RES (27)..(27): Met, Leu or Nle
  MOD_RES (28)..(28): Asn, Lys or Asp
  MOD_RES (29)..(29): Thr, Gly, Lys, Cys, Orn, homocysteine or acetyl phenyalanine
XXXGTFTSDYSKYLXERRAKXFXXWLXXX

SEQ ID NO: 59 - protein, 29 aa, Artificial Sequence
  Synthetic Glucagon Analogue
  MOD_RES (1)..(1): His, D-His, (Des-amino)His, hydroxyl-His, acetyl-His, homo-His, DMIA, N-methyl His, alpha-methyl His, or imidazole acetic acid
  MOD_RES (2)..(2): Ser, D-Ser, Ala, D-Ala, Val, Gly, N-methyl Ser, AIB, or N-methyl Ala
  MOD_RES (3)..(3): Gln, Glu, Orn or  Nle
  MOD_RES (15)..(15): Asp, Glu, cysteic acid, homoglutamic acid and homocysteic acid
  MOD_RES (16)..(16): Ser, Glu, Gln, homoglutamic acid or homocysteic acid
  MISC_FEATURE (20)..(24): Lactam ring between side chains at position 20 and 24
  MOD_RES (21)..(21): Gln, Glu, Asp, Lys, Cys, Orn, homocysteine or acetyl phenyalanine
  MOD_RES (23)..(23): Val or Ile
  MOD_RES (27)..(27): Met, Leu or Nle
  MOD_RES (28)..(28): Asn, Lys or Asp
  MOD_RES (29)..(29): Thr, Gly, Lys, Cys, Orn, homocysteine or acetyl pheylalanine
XXXGTFTSDYSKYLXXRRAKXFXEWLXXX

SEQ ID NO: 60 - protein, 29 aa, Artificial Sequence
  Synthetic Glucagon Analogue
  MOD_RES (1)..(1): His, D-His, (Des-amino)His, hydroxyl-His, acetyl-His, homo-His, DMIA, N-methyl His, alpha-methyl His, or imidazole acetic acid
  MOD_RES (2)..(2): Ser, D-Ser, Ala, D-Ala, Val, Gly, N-methyl Ser, AIB or N-methyl Ala
  MOD_RES (3)..(3): Gln, Glu, Orn or  Nle
  MOD_RES (15)..(15): Asp, Glu, cysteic acid, homoglutamic acid and homocysteic acid
  MOD_RES (16)..(16): Ser, Glu, Gln, homoglutamic acid or homocysteic acid
  MOD_RES (20)..(20): Gln, Lys, Arg, Orn, or Citrulline
  MOD_RES (21)..(21): Gln, Glu, Asp, Lys, Cys, Orn, homocysteine or acetyl phenyalanine
  MOD_RES (23)..(23): Val or Ile
  MISC_FEATURE (24)..(28): Lactam ring between side chains at position 24 and 28
  MOD_RES (27)..(27): Met, Leu or Nle
  MOD_RES (29)..(29): Thr, Gly, Lys, Cys, Orn, homocysteine or acetyl phenyalanine
XXXGTFTSDYSKYLXXRRAXXFXEWLXKX

SEQ ID NO: 61 - protein, 40 aa, Artificial Sequence
  Synthetic Glucagon Analogue
  MISC_FEATURE: positions 30 to 40 are present only if position 29 is Gly; see specification as filed for detailed description of substitutions and preferred embodiments
  MOD_RES (1)..(1): His, D-His, (Des-amino)His, hydroxyl-His, acetyl-His, homo-His, DMIA, N-methyl His, alpha-methyl His, or imidazole acetic acid
  MOD_RES (2)..(2): Ser, D-Ser, Ala, Val, Gly, N-methyl Ser, Aib, N-methyl, Ala or D-Ala
  MOD_RES (18)..(18): Ala or Arg
  MOD_RES (24)..(24): Ala, Gln or Cys-PEG
  MOD_RES (29)..(29): Thr-CONH2, Cys-PEG, or Gly
  MOD_RES (40)..(40): Cys-PEG or not present
XXQGTFTSDYSKYLDERXAKDFVXWLMNXGPSSGAPPPSC

SEQ ID NO: 62 - protein, 40 aa, Artificial Sequence
  Synthetic Glucagon Analogue
  MISC_FEATURE: positions 30 to 40 are present only if position 29 is Gly; see specification as filed for detailed description of substitutions and preferred embodiments
  MOD_RES (1)..(1): His, D-His, (Des-amino)His, hydroxyl-His, acetyl-His, homo-His, DMIA, N-methyl His, alpha-methyl His, or imidazole acetic acid
  MOD_RES (2)..(2): Ser, D-Ser, Ala, Val, Gly, N-methyl Ser, AIB0, N-methyl Ala, or D-Ala
  MOD_RES (18)..(18): Ala or Arg
  MOD_RES (24)..(24): Ala, Gln or Cys-PEG
  MOD_RES (29)..(29): Thr-CONH2, Cys-PEG, or Gly
  MOD_RES (40)..(40): Cys-PEG or not present
XXQGTFTSDYSKYLDEQXAKEFIXWLMNXGPSSGAPPPSC

SEQ ID NO: 63 - protein, 29 aa, Artificial Sequence
  Synthetic Glucagon Analogue
  MOD_RES (16)..(16): Ser, Glu, Gln, homoglutamic acid or homocysteic acid
  MOD_RES (20)..(20): Gln or Lys
  MOD_RES (21)..(21): Asp, Lys, Cys, Orn, homocysteine or acetyl phealanine
  MOD_RES (24)..(24): Gln, Lys, Cys, Orn, homocysteine or acetyl phealanine
  MOD_RES (27)..(27): Met, Leu or Nle
HSQGTFTSDYSKYLDXRRAXXFVXWLXNT

SEQ ID NO: 64 - protein, 38 aa, Artificial Sequence
  Synthetic Glucagon Analogue
  MOD_RES (15)..(15): Asp, Glu, homoglutamic acid, cysteic acid or homocysteic acid
  MOD_RES (16)..(16): Ser, Glu, Gln, homoglutamic acid or homocysteic acid
  MOD_RES (20)..(20): Gln or Lys
  MOD_RES (24)..(24): Gln or Glu
  MOD_RES (28)..(28): Asn, Lys or Asp
HSQGTFTSDYSKYLXXRRAXDFVXWLMXGGPSSGPPPS

SEQ ID NO: 65 - protein, 11 aa, Artificial Sequence
  Synthetic peptide fragment representing the carboxy terminal 10 amino acids of Exdendin-4
  MOD_RES (11)..(11): Cys-PEG
GPSSGAPPPSC

SEQ ID NO: 66 - protein, 29 aa, Artificial Sequence
  Synthetic Glucagon Analogue
  MISC_FEATURE (12)..(16): Lactam ring between side chains at positions 12 and 16
  MOD_RES (28)..(28): Asp or Asn
  MOD_RES (29)..(29): Thr or Gly
HSQGTFTSDYSKYLDERRAQDFVQWLMXX

SEQ ID NO: 67 - protein, 29 aa, Artificial Sequence
  Synthetic Glucagon Analogue
  MISC_FEATURE (16)..(20): Lactam ring between side chains at positions 16 and 20
  MOD_RES (28)..(28): Asp or Asn
  MOD_RES (29)..(29): Thr or Gly
HSQGTFTSDYSKYLDERRAKDFVQWLMXX

SEQ ID NO: 68 - protein, 29 aa, Artificial Sequence
  Synthetic Glucagon Analogue
  MISC_FEATURE (20)..(24): Lactam ring between side chains at positions 20 and 24
  MOD_RES (28)..(28): Asp or Asn
  MOD_RES (29)..(29): Thr or Gly
HSQGTFTSDYSKYLDSRRAKDFVEWLMXX

SEQ ID NO: 69 - protein, 29 aa, Artificial Sequence
  glucagon analogue
  MISC_FEATURE (24)..(28): Lactam ring between side chains at positions 24 and 28
  MOD_RES (29)..(29): Thr or Gly
HSQGTFTSDYSKYLDSRRAQDFVEWLMKX

SEQ ID NO: 70 - protein, 29 aa, Artificial Sequence
  Synthetic peptide
  MISC_FEATURE: c-term amidation
HSQGTFTSDYSKYLDERRAQDFVQWLMNT

SEQ ID NO: 71 - protein, 29 aa, Artificial Sequence
  Synthetic peptide
  MISC_FEATURE: c-term amidation
HSQGTFTSDYSKYLDERRAKDFVQWLMNT

SEQ ID NO: 72 - protein, 29 aa, Artificial Sequence
  Synthetic peptide
  MISC_FEATURE: c-term amidation
  MISC_FEATURE (16)..(20): Lactam ring between side chains at positions 16 and 20
HSQGTFTSDYSKYLDERRAKDFVQWLMNT

SEQ ID NO: 73 - protein, 29 aa, Artificial Sequence
  Synthetic peptide
  MISC_FEATURE: c-term amidation
  MISC_FEATURE (12)..(16): Lactam ring between side chains at positions 12 and 16
HSQGTFTSDYSKYLDERRAQDFVQWLMNT

SEQ ID NO: 74 - protein, 29 aa, Artificial Sequence
  Synthetic peptide
  MISC_FEATURE: c-term amidation
  MISC_FEATURE (12)..(16): Lactam ring between side chains at positions 12 and 16
HSQGTFTSDYSKYLDERRAKDFVQWLMNT

SEQ ID NO: 75 - protein, 29 aa, Artificial Sequence
  Synthetic peptide
  MISC_FEATURE: c-term amidation
  MISC_FEATURE (16)..(20): Lactam ring between side chains at positions 16 and 20
HSQGTFTSDYSKYLDKRRAEDFVQWLMNT

SEQ ID NO: 76 - protein, 29 aa, Artificial Sequence
  Synthetic peptide
  MISC_FEATURE: c-term amidation
HSQGTFTSDYSKYLDERAAKDFVQWLMNT

SEQ ID NO: 77 - protein, 29 aa, Artificial Sequence
  Synthetic Polypeptide
  MISC_FEATURE: c-term amidation
  MISC_FEATURE (16)..(20): Lactam ring between side chains at positions 16 and 20
HSQGTFTSDYSKYLDERAAKDFVQWLMNT

SEQ ID NO: 78 - protein, 29 aa, Artificial Sequence
  Synthetic Polypeptide
  MISC_FEATURE: c-term amidation
  MISC_FEATURE (12)..(16): Lactam ring between side chains at positions 12 and 16
HSQGTFTSDYSKYLDERAAQDFVQWLMNT

SEQ ID NO: 79 - protein, 29 aa, Artificial Sequence
  Synthetic Polypeptide
  MISC_FEATURE: c-term amidation
  MISC_FEATURE (12)..(16): Lactam ring between side chains at positions 12 and 16
HSQGTFTSDYSKYLDERAAKDFVQWLMNT

SEQ ID NO: 80 - protein, 29 aa, Artificial Sequence
  Synthetic Polypeptide
  MISC_FEATURE: c-term amidation
  MISC_FEATURE (16)..(20): Lactam ring between side chains at positions 16 and 20
HSQGTFTSDYSKYLDKRAAEDFVQWLMNT

SEQ ID NO: 81 - protein, 29 aa, Artificial Sequence
  Synthetic Polypeptide
  MISC_FEATURE: c-term amidation
HSQGTFTSDYSKYLDEQAAKEFIAWLMNT

SEQ ID NO: 82 - protein, 29 aa, Artificial Sequence
  Synthetic Polypeptide
  MISC_FEATURE: c-term amidation
  MISC_FEATURE (12)..(16): Lactam ring between side chains at positions 12 and 16
HSQGTFTSDYSKYLDEQAAKEFIAWLMNT

SEQ ID NO: 83 - protein, 29 aa, Artificial Sequence
  Synthetic Polypeptide
  MISC_FEATURE: c-term amidation
  MISC_FEATURE (16)..(20): Lactam ring between side chains at positions 16 and 20
HSQGTFTSDYSKYLDEQAAKEFIAWLMNT

SEQ ID NO: 84 - protein, 29 aa, Artificial Sequence
  Synthetic Polypeptide
  MISC_FEATURE: c-term amidation
HSQGTFTSDYSKYLDEQAAKEFIAWLVKG

SEQ ID NO: 85 - protein, 29 aa, Artificial Sequence
  Synthetic Polypeptide
  MISC_FEATURE: c-term amidation
  MISC_FEATURE (12)..(16): Lactam ring between side chains at positions 12 and 16
HSQGTFTSDYSKYLDEQAAKEFIAWLVKG

SEQ ID NO: 86 - protein, 29 aa, Artificial Sequence
  Synthetic Polypeptide
  MISC_FEATURE: c-term amidation
  MISC_FEATURE (16)..(20): Lactam ring between side chains at positions 16 and 20
HSQGTFTSDYSKYLDEQAAKEFIAWLVKG

SEQ ID NO: 87 - protein, 29 aa, Artificial Sequence
  Synthetic Polypeptide
  MISC_FEATURE: c-term amidation
  MOD_RES (1)..(1): (Des-amino)His
XSQGTFTSDYSKYLDERRAQDFVQWLMNT

SEQ ID NO: 88 - protein, 29 aa, Artificial Sequence
  Synthetic Polypeptide
  MISC_FEATURE: c-term amidation
  MOD_RES (1)..(1): (Des-amino)His
XSQGTFTSDYSKYLDERRAKDFVQWLMNT

SEQ ID NO: 89 - protein, 29 aa, Artificial Sequence
  Synthetic Polypeptide
  MISC_FEATURE: c-term amidation
  MOD_RES (1)..(1): (Des-amino)His
  MISC_FEATURE (16)..(20): Lactam ring between side chains at positions 16 and 20
XSQGTFTSDYSKYLDERRAKDFVQWLMNT

SEQ ID NO: 90 - protein, 29 aa, Artificial Sequence
  Synthetic Polypeptide
  MISC_FEATURE: c-term amidation
  MOD_RES (1)..(1): (Des-amino)His
  MISC_FEATURE (12)..(16): Lactam ring between side chains at positions 12 and 16
XSQGTFTSDYSKYLDERRAQDFVQWLMNT

SEQ ID NO: 91 - protein, 29 aa, Artificial Sequence
  Synthetic Polypeptide
  MISC_FEATURE: c-term amidation
  MOD_RES (1)..(1): (Des-amino)His
  MISC_FEATURE (12)..(16): Lactam ring between side chains at positions 12 and 16
XSQGTFTSDYSKYLDERRAKDFVQWLMNT

SEQ ID NO: 92 - protein, 29 aa, Artificial Sequence
  Synthetic Polypeptide
  MISC_FEATURE: c-term amidation
  MOD_RES (1)..(1): (Des-amino)His
  MISC_FEATURE (16)..(20): Lactam ring between side chains at positions 16 and 20
XSQGTFTSDYSKYLDKRRAEDFVQWLMNT

SEQ ID NO: 93 - protein, 29 aa, Artificial Sequence
  Synthetic Polypeptide
  MOD_RES (1)..(1): (Des-amino)His
  MISC_FEATURE (29)..(29): c-term amidation
XSQGTFTSDYSKYLDERAAKDFVQWLMNT

SEQ ID NO: 94 - protein, 29 aa, Artificial Sequence
  Synthetic Polypeptide
  MISC_FEATURE: c-term amidation
  MOD_RES (1)..(1): (Des-amino)His
  MISC_FEATURE (16)..(20): Lactam ring between side chains at positions 16 and 20
XSQGTFTSDYSKYLDERAAKDFVQWLMNT

SEQ ID NO: 95 - protein, 29 aa, Artificial Sequence
  Synthetic Polypeptide
  MISC_FEATURE: c-term amidation
  MOD_RES (1)..(1): (Des-amino)His
  MISC_FEATURE (12)..(16): Lactam ring between side chains at positions 12 and 16
XSQGTFTSDYSKYLDERAAQDFVQWLMNT

SEQ ID NO: 96 - protein, 29 aa, Artificial Sequence
  Synthetic Polypeptide
  MISC_FEATURE: c-term amidation
  MOD_RES (1)..(1): (Des-amino)His
  MISC_FEATURE (12)..(16): Lactam ring between side chains at positions 12 and 16
XSQGTFTSDYSKYLDERAAKDFVQWLMNT

SEQ ID NO: 97 - protein, 29 aa, Artificial Sequence
  Synthetic Polypeptide
  MISC_FEATURE: c-term amidation
  MOD_RES (1)..(1): (Des-amino)His
  MISC_FEATURE (16)..(20): Lactam ring between side chains at positions 16 and 20
XSQGTFTSDYSKYLDKRAAEDFVQWLMNT

SEQ ID NO: 98 - protein, 29 aa, Artificial Sequence
  Synthetic Polypeptide
  MISC_FEATURE: c-term amidation
  MOD_RES (1)..(1): (Des-amino)His
  MISC_FEATURE (12)..(16): Lactam ring between side chains at positions 12 and 16
XSQGTFTSDYSKYLDEQAAKEFIAWLMNT

SEQ ID NO: 99 - protein, 29 aa, Artificial Sequence
  Synthetic Polypeptide
  MISC_FEATURE: c-term amidation
  MOD_RES (1)..(1): (Des-amino)His
  MISC_FEATURE (12)..(16): Lactam ring between side chains at positions 12 and 16
XSQGTFTSDYSKYLDEQAAKEFIAWLMNT

SEQ ID NO: 100 - protein, 29 aa, Artificial Sequence
  Synthetic Polypeptide
  MISC_FEATURE: c-term amidation
  MOD_RES (1)..(1): (Des-amino)His
  MISC_FEATURE (16)..(20): Lactam ring between side chains at positions 16 and 20
XSQGTFTSDYSKYLDEQAAKEFIAWLMNT

SEQ ID NO: 101 - protein, 29 aa, Artificial Sequence
  Synthetic Polypeptide
  MISC_FEATURE: c-term amidation
  MOD_RES (1)..(1): (Des-amino)His
XSQGTFTSDYSKYLDEQAAKEFIAWLVKG

SEQ ID NO: 102 - protein, 29 aa, Artificial Sequence
  Synthetic Polypeptide
  MISC_FEATURE: C-terminal amidation
  MOD_RES (1)..(1): (Des-amino)His
  MISC_FEATURE (12)..(16): Lactam ring between side chains at positions 12 and 16
XSQGTFTSDYSKYLDEQAAKEFIAWLVKG

SEQ ID NO: 103 - protein, 29 aa, Artificial Sequence
  Synthetic Polypeptide
  MISC_FEATURE: C-terminal amidation
  MOD_RES (1)..(1): (Des-amino)His
  MISC_FEATURE (16)..(20): Lactam ring between side chains at positions 16 and 20
XSQGTFTSDYSKYLDEQAAKEFIAWLVKG

SEQ ID NO: 104 - protein, 29 aa, Artificial Sequence
  Synthetic Polypeptide
  MOD_RES (2)..(2): Xaa is AIB
  MOD_RES (29)..(29): C-terminal amidation
HXQGTFTSDYSKYLDERRAQDFVQWLMNT

SEQ ID NO: 105 - protein, 29 aa, Artificial Sequence
  Synthetic Polypeptide
  MOD_RES (2)..(2): Xaa is AIB
  MISC_FEATURE (16)..(20): Lactam ring between side chains at positions 16 and 20
  MOD_RES (29)..(29): C-terminal amidation
HXQGTFTSDYSKYLDERRAKDFVQWLMNT

SEQ ID NO: 106 - protein, 29 aa, Artificial Sequence
  Synthetic Polypeptide
  MOD_RES (2)..(2): Xaa is AIB
  MISC_FEATURE (16)..(20): Lactam ring between side chains at positions 16 and 20
  MOD_RES (29)..(29): C-terminal amidation
HXQGTFTSDYSKYLDERRAKDFVQWLMNT

SEQ ID NO: 107 - protein, 29 aa, Artificial Sequence
  Synthetic Polypeptide
  MOD_RES (2)..(2): Xaa is AIB
  MISC_FEATURE (12)..(16): Lactam ring between side chains at positions 12 and 16
  MOD_RES (29)..(29): C-terminal amidation
HXQGTFTSDYSKYLDERRAQDFVQWLMNT

SEQ ID NO: 108 - protein, 29 aa, Artificial Sequence
  Synthetic Polypeptide
  MOD_RES (2)..(2): Xaa is AIB
  MISC_FEATURE (12)..(16): Lactam ring between side chains at positions 12 and 16
  MOD_RES (29)..(29): C-terminal amidation
HXQGTFTSDYSKYLDERRAKDFVQWLMNT

SEQ ID NO: 109 - protein, 29 aa, Artificial Sequence
  Synthetic Polypeptide
  MOD_RES (2)..(2): Xaa is AIB
  MISC_FEATURE (16)..(20): Lactam ring between side chains at positions 16 and 20
  MOD_RES (29)..(29): C-terminal amidation
HXQGTFTSDYSKYLDKRRAEDFVQWLMNT

SEQ ID NO: 110 - protein, 29 aa, Artificial Sequence
  Synthetic Polypeptide
  MOD_RES (2)..(2): Xaa is AIB
  MOD_RES (29)..(29): C-terminal amidation
HXQGTFTSDYSKYLDERAAKDFVQWLMNT

SEQ ID NO: 111 - protein, 29 aa, Artificial Sequence
  Synthetic Polypeptide
  MOD_RES (2)..(2): Xaa is AIB
  MISC_FEATURE (16)..(20): Lactam ring between side chains at positions 16 and 20
  MOD_RES (29)..(29): C-terminal amidation
HXQGTFTSDYSKYLDERAAKDFVQWLMNT

SEQ ID NO: 112 - protein, 29 aa, Artificial Sequence
  Synthetic Polypeptide
  MOD_RES (2)..(2): Xaa is AIB
  MISC_FEATURE (12)..(16): Lactam ring between side chains at positions 12 and 16
  MOD_RES (29)..(29): C-terminal amidation
HXQGTFTSDYSKYLDERAAQDFVQWLMNT

SEQ ID NO: 113 - protein, 29 aa, Artificial Sequence
  glucagon analog
  MOD_RES (2)..(2): Xaa is AIB
  MISC_FEATURE (12)..(16): Lactam ring between side chains at positions 12 and 16
  MOD_RES (29)..(29): C-terminal amidation
HXQGTFTSDYSKYLDERAAKDFVQWLMNT

SEQ ID NO: 114 - protein, 29 aa, Artificial Sequence
  glucagon analog
  MOD_RES (2)..(2): Xaa is AIB
  MISC_FEATURE (16)..(20): Lactam ring between side chains at positions 16 and 20
  MOD_RES (29)..(29): C-terminal amidation
HXQGTFTSDYSKYLDKRAAEDFVQWLMNT

SEQ ID NO: 115 - protein, 29 aa, Artificial Sequence
  glucagon analog
  MOD_RES (2)..(2): Xaa is AIB
  MOD_RES (29)..(29): C-terminal amidation
HXQGTFTSDYSKYLDEQAAKEFIAWLMNT

SEQ ID NO: 116 - protein, 29 aa, Artificial Sequence
  glucagon analog
  MOD_RES (2)..(2): Xaa is AIB
  MISC_FEATURE (12)..(16): Lactam ring between side chains at positions 12 and 16
  MOD_RES (29)..(29): C-terminal amidation
HXQGTFTSDYSKYLDEQAAKEFIAWLMNT

SEQ ID NO: 117 - protein, 29 aa, Artificial Sequence
  glucagon analog
  MOD_RES (2)..(2): Xaa is AIB
  MISC_FEATURE (16)..(20): Lactam ring between side chains at positions 16 and 20
  MOD_RES (29)..(29): C-terminal amidation
HXQGTFTSDYSKYLDEQAAKEFIAWLMNT

SEQ ID NO: 118 - protein, 29 aa, Artificial Sequence
  glucagon analog
  MOD_RES (2)..(2): Xaa is AIB
  MOD_RES (29)..(29): C-terminal amidation
HXQGTFTSDYSKYLDEQAAKEFIAWLVKG

SEQ ID NO: 119 - protein, 29 aa, Artificial Sequence
  glucagon analog
  MOD_RES (2)..(2): Xaa is AIB
  MISC_FEATURE (12)..(16): Lactam ring between side chains at positions 12 and 16
  MOD_RES (29)..(29): C-terminal amidation
HXQGTFTSDYSKYLDEQAAKEFIAWLVKG

SEQ ID NO: 120 - protein, 29 aa, Artificial Sequence
  glucagon analog
  MOD_RES (2)..(2): Xaa is AIB
  MISC_FEATURE (16)..(20): Lactam ring between side chains at positions 16 and 20
  MOD_RES (29)..(29): C-terminal amidation
HXQGTFTSDYSKYLDEQAAKEFIAWLVKG

SEQ ID NO: 121 - protein, 29 aa, Artificial Sequence
  glucagon analog
  MOD_RES (2)..(2): D-Ala
  MOD_RES (29)..(29): C-terminal amidation
HXQGTFTSDYSKYLDERRAQDFVQWLMNT

SEQ ID NO: 122 - protein, 29 aa, Artificial Sequence
  glucagon analog
  MOD_RES (2)..(2): D-Ala
  MOD_RES (29)..(29): C-terminal amidation
HXQGTFTSDYSKYLDERRAKDFVQWLMNT

SEQ ID NO: 123 - protein, 29 aa, Artificial Sequence
  glucagon analog
  MOD_RES (2)..(2): D-Ala
  MISC_FEATURE (16)..(20): Lactam ring between side chains at positions 16 and 20
  MOD_RES (29)..(29): C-terminal amidation
HXQGTFTSDYSKYLDERRAKDFVQWLMNT

SEQ ID NO: 124 - protein, 29 aa, Artificial Sequence
  glucagon analog
  MOD_RES (2)..(2): D-Ala
  MISC_FEATURE (12)..(16): Lactam ring between side chains at positions 12 and 16
  MOD_RES (29)..(29): C-terminal amidation
HXQGTFTSDYSKYLDERRAQDFVQWLMNT

SEQ ID NO: 125 - protein, 29 aa, Artificial Sequence
  glucagon analog
  MOD_RES (2)..(2): D-Ala
  MISC_FEATURE (12)..(16): Lactam ring between side chains at positions 12 and 16
  MOD_RES (29)..(29): C-terminal amidation
HXQGTFTSDYSKYLDERRAKDFVQWLMNT

SEQ ID NO: 126 - protein, 29 aa, Artificial Sequence
  glucagon analog
  MOD_RES (2)..(2): D-Ala
  MISC_FEATURE (16)..(20): Lactam ring between side chains at positions 16 and 20
  MOD_RES (29)..(29): C-terminal amidation
HXQGTFTSDYSKYLDKRRAEDFVQWLMNT

SEQ ID NO: 127 - protein, 29 aa, Artificial Sequence
  glucagon analog
  MOD_RES (2)..(2): D-Ala
  MOD_RES (29)..(29): C-terminal amidation
HXQGTFTSDYSKYLDERAAKDFVQWLMNT

SEQ ID NO: 128 - protein, 29 aa, Artificial Sequence
  glucagon analog
  MOD_RES (2)..(2): D-Ala
  MISC_FEATURE (16)..(20): Lactam ring between side chains at positions 16 and 20
  MOD_RES (29)..(29): C-terminal amidation
HXQGTFTSDYSKYLDERAAKDFVQWLMNT

SEQ ID NO: 129 - protein, 29 aa, Artificial Sequence
  glucagon analog
  MOD_RES (2)..(2): D-Ala
  MISC_FEATURE (12)..(16): Lactam ring between side chains at positions 12 and 16
  MOD_RES (29)..(29): C-terminal amidation
HXQGTFTSDYSKYLDERAAQDFVQWLMNT

SEQ ID NO: 130 - protein, 29 aa, Artificial Sequence
  glucagon analog
  MOD_RES (2)..(2): D-Ala
  MISC_FEATURE (12)..(16): Lactam ring between side chains at positions 12 and 16
  MOD_RES (29)..(29): C-terminal amidation
HXQGTFTSDYSKYLDERAAKDFVQWLMNT

SEQ ID NO: 131 - protein, 29 aa, Artificial Sequence
  glucagon analog
  MOD_RES (2)..(2): D-Ala
  MISC_FEATURE (16)..(20): Lactam ring between side chains at positions 16 and 20
  MOD_RES (29)..(29): C-terminal amidation
HXQGTFTSDYSKYLDKRAAEDFVQWLMNT

SEQ ID NO: 132 - protein, 29 aa, Artificial Sequence
  glucagon analog
  MOD_RES (2)..(2): D-Ala
  MOD_RES (29)..(29): C-terminal amidation
HXQGTFTSDYSKYLDEQAAKEFIAWLMNT

SEQ ID NO: 133 - protein, 29 aa, Artificial Sequence
  glucagon analog
  MOD_RES (2)..(2): D-Ala
  MISC_FEATURE (12)..(16): Lactam ring between side chains at positions 12 and 16
  MOD_RES (29)..(29): C-terminal amidation
HXQGTFTSDYSKYLDEQAAKEFIAWLMNT

SEQ ID NO: 134 - protein, 29 aa, Artificial Sequence
  glucagon analog
  MOD_RES (2)..(2): D-Ala
  MISC_FEATURE (16)..(20): Lactam ring between side chains at positions 16 and 20
  MOD_RES (29)..(29): C-terminal amidation
HXQGTFTSDYSKYLDEQAAKEFIAWLMNT

SEQ ID NO: 135 - protein, 29 aa, Artificial Sequence
  glucagon analog
  MOD_RES (2)..(2): D-Ala
  MOD_RES (29)..(29): C-terminal amidation
HXQGTFTSDYSKYLDEQAAKEFIAWLVKG

SEQ ID NO: 136 - protein, 29 aa, Artificial Sequence
  glucagon analog
  MOD_RES (2)..(2): D-Ala
  MISC_FEATURE (12)..(16): Lactam ring between side chains at positions 12 and 16
  MOD_RES (29)..(29): C-terminal amidation
HXQGTFTSDYSKYLDEQAAKEFIAWLVKG

SEQ ID NO: 137 - protein, 29 aa, Artificial Sequence
  glucagon analog
  MOD_RES (2)..(2): D-Ala
  MISC_FEATURE (16)..(20): Lactam ring between side chains at positions 16 and 20
  MOD_RES (29)..(29): C-terminal amidation
HXQGTFTSDYSKYLDEQAAKEFIAWLVKG

SEQ ID NO: 138 - protein, 29 aa, Artificial Sequence
  glucagon analog
  MOD_RES (29)..(29): C-terminal amidation
HSEGTFTSDYSKYLDERRAQDFVQWLMNT

SEQ ID NO: 139 - protein, 29 aa, Artificial Sequence
  glucagon analog
  MOD_RES (29)..(29): C-terminal amidation
HSEGTFTSDYSKYLDERRAKDFVQWLMNT

SEQ ID NO: 140 - protein, 29 aa, Artificial Sequence
  glucagon analog
  MISC_FEATURE (16)..(20): Lactam ring between side chains at positions 16 and 20
  MOD_RES (29)..(29): C-terminal amidation
HSEGTFTSDYSKYLDERRAKDFVQWLMNT

SEQ ID NO: 141 - protein, 29 aa, Artificial Sequence
  glucagon analog
  MISC_FEATURE (12)..(16): Lactam ring between side chains at positions 12 and 16
  MOD_RES (29)..(29): C-terminal amidation
HSEGTFTSDYSKYLDERRAQDFVQWLMNT

SEQ ID NO: 142 - protein, 29 aa, Artificial Sequence
  glucagon analog
  MISC_FEATURE (12)..(16): Lactam ring between side chains at positions 12 and 16
  MOD_RES (29)..(29): C-terminal amidation
HSEGTFTSDYSKYLDERRAKDFVQWLMNT

SEQ ID NO: 143 - protein, 29 aa, Artificial Sequence
  glucagon analog
  MISC_FEATURE (16)..(20): Lactam ring between side chains at positions 16 and 20
  MOD_RES (29)..(29): C-terminal amidation
HSEGTFTSDYSKYLDKRRAEDFVQWLMNT

SEQ ID NO: 144 - protein, 29 aa, Artificial Sequence
  glucagon analog
  MOD_RES (29)..(29): C-terminal amidation
HSEGTFTSDYSKYLDERAAKDFVQWLMNT

SEQ ID NO: 145 - protein, 29 aa, Artificial Sequence
  glucagon analog
  MISC_FEATURE (16)..(20): Lactam ring between side chains at positions 16 and 20
  MOD_RES (29)..(29): C-terminal amidation
HSEGTFTSDYSKYLDERAAKDFVQWLMNT

SEQ ID NO: 146 - protein, 29 aa, Artificial Sequence
  glucagon analog
  MISC_FEATURE (12)..(16): Lactam ring between side chains at positions 12 and 16
  MOD_RES (29)..(29): C-terminal amidation
HSEGTFTSDYSKYLDERAAQDFVQWLMNT

SEQ ID NO: 147 - protein, 29 aa, Artificial Sequence
  glucagon analog
  MISC_FEATURE (12)..(16): Lactam ring between side chains at positions 12 and 16
  MOD_RES (29)..(29): C-terminal amidation
HSEGTFTSDYSKYLDERAAKDFVQWLMNT

SEQ ID NO: 148 - protein, 29 aa, Artificial Sequence
  glucagon analog
  MISC_FEATURE (16)..(20): Lactam ring between side chains at positions 16 and 20
  MOD_RES (29)..(29): C-terminal amidation
HSEGTFTSDYSKYLDKRAAEDFVQWLMNT

SEQ ID NO: 149 - protein, 29 aa, Artificial Sequence
  glucagon analog
  MOD_RES (29)..(29): C-terminal amidation
HSEGTFTSDYSKYLDEQAAKEFIAWLMNT

SEQ ID NO: 150 - protein, 29 aa, Artificial Sequence
  glucagon analog
  MISC_FEATURE (12)..(16): Lactam ring between side chains at positions 12 and 16
  MOD_RES (29)..(29): C-terminal amidation
HSEGTFTSDYSKYLDEQAAKEFIAWLMNT

SEQ ID NO: 151 - protein, 29 aa, Artificial Sequence
  glucagon analog
  MISC_FEATURE (16)..(20): Lactam ring between side chains at positions 16 and 20
  MOD_RES (29)..(29): C-terminal amidation
HSEGTFTSDYSKYLDEQAAKEFIAWLMNT

SEQ ID NO: 152 - protein, 29 aa, Artificial Sequence
  glucagon analog
  MOD_RES (29)..(29): C-terminal amidation
HSEGTFTSDYSKYLDEQAAKEFIAWLVKG

SEQ ID NO: 153 - protein, 29 aa, Artificial Sequence
  glucagon analog
  MISC_FEATURE (12)..(16): Lactam ring between side chains at positions 12 and 16
  MOD_RES (29)..(29): C-terminal amidation
HSEGTFTSDYSKYLDEQAAKEFIAWLVKG

SEQ ID NO: 154 - protein, 29 aa, Artificial Sequence
  glucagon analog
  MISC_FEATURE (16)..(20): Lactam ring between side chains at positions 16 and 20
  MOD_RES (29)..(29): C-terminal amidation
HSEGTFTSDYSKYLDEQAAKEFIAWLVKG

SEQ ID NO: 155 - protein, 29 aa, Artificial Sequence
  glucagon analog
  MOD_RES (1)..(1): (Des-amino)His
  MOD_RES (29)..(29): C-terminal amidation
XSEGTFTSDYSKYLDERRAQDFVQWLMNT

SEQ ID NO: 156 - protein, 29 aa, Artificial Sequence
  glucagon analog
  MOD_RES (1)..(1): (Des-amino)His
  MOD_RES (29)..(29): C-terminal amidation
XSEGTFTSDYSKYLDERRAKDFVQWLMNT

SEQ ID NO: 157 - protein, 29 aa, Artificial Sequence
  glucagon analog
  MOD_RES (1)..(1): (Des-amino)His
  MISC_FEATURE (16)..(20): Lactam ring between side chains at positions 16 and 20
  MOD_RES (29)..(29): C-terminal amidation
XSEGTFTSDYSKYLDERRAKDFVQWLMNT

SEQ ID NO: 158 - protein, 29 aa, Artificial Sequence
  glucagon analog
  MOD_RES (1)..(1): (Des-amino)His
  MISC_FEATURE (12)..(16): Lactam ring between side chains at positions 12 and 16
  MOD_RES (29)..(29): C-terminal amidation
XSEGTFTSDYSKYLDERRAQDFVQWLMNT

SEQ ID NO: 159 - protein, 29 aa, Artificial Sequence
  glucagon analog
  MOD_RES (1)..(1): (Des-amino)His
  MISC_FEATURE (12)..(16): Lactam ring between side chains at positions 12 and 16
  MOD_RES (29)..(29): C-terminal amidation
XSEGTFTSDYSKYLDERRAKDFVQWLMNT

SEQ ID NO: 160 - protein, 29 aa, Artificial Sequence
  glucagon analog
  MOD_RES (1)..(1): (Des-amino)His
  MISC_FEATURE (16)..(20): Lactam ring between side chains at positions 16 and 20
  MOD_RES (29)..(29): C-terminal amidation
XSEGTFTSDYSKYLDKRRAEDFVQWLMNT

SEQ ID NO: 161 - protein, 29 aa, Artificial Sequence
  glucagon analog
  MOD_RES (1)..(1): (Des-amino)His
  MOD_RES (29)..(29): C-terminal amidation
XSEGTFTSDYSKYLDERAAKDFVQWLMNT

SEQ ID NO: 162 - protein, 29 aa, Artificial Sequence
  glucagon analog
  MOD_RES (1)..(1): (Des-amino)His
  MISC_FEATURE (16)..(20): Lactam ring between side chains at positions 16 and 20
  MOD_RES (29)..(29): C-terminal amidation
XSEGTFTSDYSKYLDERAAKDFVQWLMNT

SEQ ID NO: 163 - protein, 29 aa, Artificial Sequence
  glucagon analog
  MOD_RES (1)..(1): (Des-amino)His
  MISC_FEATURE (12)..(16): Lactam ring between side chains at positions 12 and 16
  MOD_RES (29)..(29): C-terminal amidation
XSEGTFTSDYSKYLDERAAQDFVQWLMNT

SEQ ID NO: 164 - protein, 29 aa, Artificial Sequence
  glucagon analog
  MOD_RES (1)..(1): (Des-amino)His
  MISC_FEATURE (12)..(16): Lactam ring between side chains at positions 12 and 16
  MOD_RES (29)..(29): C-terminal amidation
XSEGTFTSDYSKYLDERAAKDFVQWLMNT

SEQ ID NO: 165 - protein, 29 aa, Artificial Sequence
  glucagon analog
  MOD_RES (1)..(1): (Des-amino)His
  MISC_FEATURE (16)..(20): Lactam ring between side chains at positions 16 and 20
  MOD_RES (29)..(29): C-terminal amidation
XSEGTFTSDYSKYLDKRAAEDFVQWLMNT

SEQ ID NO: 166 - protein, 29 aa, Artificial Sequence
  glucagon analog
  MOD_RES (1)..(1): (Des-amino)His
  MOD_RES (29)..(29): C-terminal amidation
XSEGTFTSDYSKYLDEQAAKEFIAWLMNT

SEQ ID NO: 167 - protein, 29 aa, Artificial Sequence
  glucagon analog
  MOD_RES (1)..(1): (Des-amino)His
  MISC_FEATURE (12)..(16): Lactam ring between side chains at positions 12 and 16
  MOD_RES (29)..(29): C-terminal amidation
XSEGTFTSDYSKYLDEQAAKEFIAWLMNT

SEQ ID NO: 168 - protein, 29 aa, Artificial Sequence
  glucagon analog
  MOD_RES (1)..(1): (Des-amino)His
  MISC_FEATURE (16)..(20): Lactam ring between side chains at positions 16 and 20
  MOD_RES (29)..(29): C-terminal amidation
XSEGTFTSDYSKYLDEQAAKEFIAWLMNT

SEQ ID NO: 169 - protein, 29 aa, Artificial Sequence
  glucagon analog
  MOD_RES (1)..(1): (Des-amino)His
  MOD_RES (29)..(29): C-terminal amidation
XSEGTFTSDYSKYLDEQAAKEFIAWLVKG

SEQ ID NO: 170 - protein, 29 aa, Artificial Sequence
  glucagon analog
  MOD_RES (1)..(1): (Des-amino)His
  MISC_FEATURE (12)..(16): Lactam ring between side chains at positions 12 and 16
  MOD_RES (29)..(29): C-terminal amidation
XSEGTFTSDYSKYLDEQAAKEFIAWLVKG

SEQ ID NO: 171 - protein, 29 aa, Artificial Sequence
  glucagon analog
  MOD_RES (1)..(1): (Des-amino)His
  MISC_FEATURE (16)..(20): Lactam ring between side chains at positions 16 and 20
  MOD_RES (29)..(29): C-terminal amidation
XSEGTFTSDYSKYLDEQAAKEFIAWLVKG

SEQ ID NO: 172 - protein, 29 aa, Artificial Sequence
  glucagon analog
  MOD_RES (2)..(2): Xaa is AIB
  MOD_RES (29)..(29): C-terminal amidation
HXEGTFTSDYSKYLDERRAQDFVQWLMNT

SEQ ID NO: 173 - protein, 29 aa, Artificial Sequence
  glucagon analog
  MOD_RES (2)..(2): Xaa is AIB
  MOD_RES (29)..(29): C-terminal amidation
HXEGTFTSDYSKYLDERRAKDFVQWLMNT

SEQ ID NO: 174 - protein, 29 aa, Artificial Sequence
  glucagon analog
  MOD_RES (2)..(2): Xaa is AIB
  MISC_FEATURE (16)..(20): Lactam ring between side chains at positions 16 and 20
  MOD_RES (29)..(29): C-terminal amidation
HXEGTFTSDYSKYLDERRAKDFVQWLMNT

SEQ ID NO: 175 - protein, 29 aa, Artificial Sequence
  glucagon analog
  MOD_RES (2)..(2): Xaa is AIB
  MISC_FEATURE (12)..(16): Lactam ring between side chains at positions 12 and 16
  MOD_RES (29)..(29): C-terminal amidation
HXEGTFTSDYSKYLDERRAQDFVQWLMNT

SEQ ID NO: 176 - protein, 29 aa, Artificial Sequence
  glucagon analog
  MOD_RES (2)..(2): Xaa is AIB
  MISC_FEATURE (12)..(16): Lactam ring between side chains at positions 12 and 16
  MOD_RES (29)..(29): C-terminal amidation
HXEGTFTSDYSKYLDERRAKDFVQWLMNT

SEQ ID NO: 177 - protein, 29 aa, Artificial Sequence
  glucagon analog
  MOD_RES (2)..(2): Xaa is AIB
  MISC_FEATURE (16)..(20): Lactam ring between side chains at positions 16 and 20
  MOD_RES (29)..(29): C-terminal amidation
HXEGTFTSDYSKYLDKRRAEDFVQWLMNT

SEQ ID NO: 178 - protein, 29 aa, Artificial Sequence
  glucagon analog
  MOD_RES (2)..(2): Xaa is AIB
  MOD_RES (29)..(29): C-terminal amidation
HXEGTFTSDYSKYLDERAAKDFVQWLMNT

SEQ ID NO: 179 - protein, 29 aa, Artificial Sequence
  glucagon analog
  MOD_RES (2)..(2): Xaa is AIB
  MISC_FEATURE (16)..(20): Lactam ring between side chains at positions 16 and 20
  MOD_RES (29)..(29): C-terminal amidation
HXEGTFTSDYSKYLDERAAKDFVQWLMNT

SEQ ID NO: 180 - protein, 29 aa, Artificial Sequence
  glucagon analog
  MOD_RES (2)..(2): Xaa is AIB
  MISC_FEATURE (12)..(16): Lactam ring between side chains at positions 12 and 16
  MOD_RES (29)..(29): C-terminal amidation
HXEGTFTSDYSKYLDERAAQDFVQWLMNT

SEQ ID NO: 181 - protein, 29 aa, Artificial Sequence
  glucagon analog
  MOD_RES (2)..(2): Xaa is AIB
  MISC_FEATURE (12)..(16): Lactam ring between side chains at positions 12 and 16
  MOD_RES (29)..(29): C-terminal amidation
HXEGTFTSDYSKYLDERAAKDFVQWLMNT

SEQ ID NO: 182 - protein, 29 aa, Artificial Sequence
  glucagon analog
  MOD_RES (2)..(2): Xaa is AIB
  MISC_FEATURE (16)..(20): Lactam ring between side chains at positions 16 and 20
  MOD_RES (29)..(29): C-terminal amidation
HXEGTFTSDYSKYLDKRAAEDFVQWLMNT

SEQ ID NO: 183 - protein, 29 aa, Artificial Sequence
  glucagon analog
  MOD_RES (2)..(2): Xaa is AIB
  MOD_RES (29)..(29): C-terminal amidation
HXEGTFTSDYSKYLDEQAAKEFIAWLMNT

SEQ ID NO: 184 - protein, 29 aa, Artificial Sequence
  glucagon analog
  MOD_RES (2)..(2): Xaa is AIB
  MISC_FEATURE (12)..(16): Lactam ring between side chains at positions 12 and 16
  MOD_RES (29)..(29): C-terminal amidation
HXEGTFTSDYSKYLDEQAAKEFIAWLMNT

SEQ ID NO: 185 - protein, 29 aa, Artificial Sequence
  glucagon analog
  MOD_RES (2)..(2): Xaa is AIB
  MISC_FEATURE (16)..(20): Lactam ring between side chains at positions 16 and 20
  MOD_RES (29)..(29): C-terminal amidation
HXEGTFTSDYSKYLDEQAAKEFIAWLMNT

SEQ ID NO: 186 - protein, 29 aa, Artificial Sequence
  glucagon analog
  MOD_RES (2)..(2): Xaa is AIB
  MOD_RES (29)..(29): C-terminal amidation
HXEGTFTSDYSKYLDEQAAKEFIAWLVKG

SEQ ID NO: 187 - protein, 29 aa, Artificial Sequence
  glucagon analog
  MOD_RES (2)..(2): Xaa is AIB
  MISC_FEATURE (12)..(16): Lactam ring between side chains at positions 12 and 16
  MOD_RES (29)..(29): C-terminal amidation
HXEGTFTSDYSKYLDEQAAKEFIAWLVKG

SEQ ID NO: 188 - protein, 29 aa, Artificial Sequence
  glucagon analog
  MOD_RES (2)..(2): Xaa is AIB
  MISC_FEATURE (16)..(20): Lactam ring between side chains at positions 16 and 20
  MOD_RES (29)..(29): C-terminal amidation
HXEGTFTSDYSKYLDEQAAKEFIAWLVKG

SEQ ID NO: 189 - protein, 29 aa, Artificial Sequence
  glucagon analog
  MOD_RES (2)..(2): Xaa is D-Ala
  MOD_RES (29)..(29): C-terminal amidation
HXEGTFTSDYSKYLDERRAQDFVQWLMNT

SEQ ID NO: 190 - protein, 29 aa, Artificial Sequence
  glucagon analog
  MOD_RES (2)..(2): Xaa is D-Ala
  MOD_RES (29)..(29): C-terminal amidation
HXEGTFTSDYSKYLDERRAKDFVQWLMNT

SEQ ID NO: 191 - protein, 29 aa, Artificial Sequence
  glucagon analog
  MOD_RES (2)..(2): Xaa is D-Ala
  MISC_FEATURE (16)..(20): Lactam ring between side chains at positions 16 and 20
  MOD_RES (29)..(29): C-terminal amidation
HXEGTFTSDYSKYLDERRAKDFVQWLMNT

SEQ ID NO: 192 - protein, 29 aa, Artificial Sequence
  glucagon analog
  MOD_RES (2)..(2): Xaa is D-Ala
  MISC_FEATURE (12)..(16): Lactam ring between side chains at positions 12 and 16
  MOD_RES (29)..(29): C-terminal amidation
HXEGTFTSDYSKYLDERRAQDFVQWLMNT

SEQ ID NO: 193 - protein, 29 aa, Artificial Sequence
  glucagon analog
  MOD_RES (2)..(2): Xaa is D-Ala
  MISC_FEATURE (12)..(16): Lactam ring between side chains at positions 12 and 16
  MOD_RES (29)..(29): C-terminal amidation
HXEGTFTSDYSKYLDERRAKDFVQWLMNT

SEQ ID NO: 194 - protein, 29 aa, Artificial Sequence
  glucagon analog
  MOD_RES (2)..(2): Xaa is D-Ala
  MISC_FEATURE (16)..(20): Lactam ring between side chains at positions 16 and 20
  MOD_RES (29)..(29): C-terminal amidation
HXEGTFTSDYSKYLDKRRAEDFVQWLMNT

SEQ ID NO: 195 - protein, 29 aa, Artificial Sequence
  glucagon analog
  MOD_RES (2)..(2): Xaa is D-Ala
  MISC_FEATURE (16)..(20): Lactam ring between side chains at positions 16 and 20
  MOD_RES (29)..(29): C-terminal amidation
HXEGTFTSDYSKYLDERAAKDFVQWLMNT

SEQ ID NO: 196 - protein, 29 aa, Artificial Sequence
  glucagon analog
  MOD_RES (2)..(2): Xaa is D-Ala
  MISC_FEATURE (16)..(20): Lactam ring between side chains at positions 16 and 20
  MOD_RES (29)..(29): C-terminal amidation
HXEGTFTSDYSKYLDERAAKDFVQWLMNT

SEQ ID NO: 197 - protein, 29 aa, Artificial Sequence
  glucagon analog
  MOD_RES (2)..(2): Xaa is D-Ala
  MISC_FEATURE (12)..(16): Lactam ring between side chains at positions 12 and 16
  MOD_RES (29)..(29): C-terminal amidation
HXEGTFTSDYSKYLDERAAQDFVQWLMNT

SEQ ID NO: 198 - protein, 29 aa, Artificial Sequence
  glucagon analog
  MOD_RES (2)..(2): Xaa is D-Ala
  MISC_FEATURE (12)..(16): Lactam ring between side chains at positions 12 and 16
  MOD_RES (29)..(29): C-terminal amidation
HXEGTFTSDYSKYLDERAAKDFVQWLMNT

SEQ ID NO: 199 - protein, 29 aa, Artificial Sequence
  glucagon analog
  MOD_RES (2)..(2): Xaa is D-Ala
  MISC_FEATURE (16)..(20): Lactam ring between side chains at positions 16 and 20
  MOD_RES (29)..(29): C-terminal amidation
HXEGTFTSDYSKYLDKRAAEDFVQWLMNT

SEQ ID NO: 200 - protein, 29 aa, Artificial Sequence
  glucagon analog
  MOD_RES (2)..(2): Xaa is D-Ala
  MOD_RES (29)..(29): C-terminal amidation
HXEGTFTSDYSKYLDEQAAKEFIAWLMNT

SEQ ID NO: 201 - protein, 29 aa, Artificial Sequence
  glucagon analog
  MOD_RES (2)..(2): Xaa is D-Ala
  MISC_FEATURE (12)..(16): Lactam ring between side chains at positions 12 and 16
  MOD_RES (29)..(29): C-terminal amidation
HXEGTFTSDYSKYLDEQAAKEFIAWLMNT

SEQ ID NO: 202 - protein, 29 aa, Artificial Sequence
  glucagon analog
  MOD_RES (2)..(2): Xaa is D-Ala
  MISC_FEATURE (16)..(20): Lactam ring between side chains at positions 16 and 20
  MOD_RES (29)..(29): C-terminal amidation
HXEGTFTSDYSKYLDEQAAKEFIAWLMNT

SEQ ID NO: 203 - protein, 29 aa, Artificial Sequence
  glucagon analog
  MOD_RES (2)..(2): Xaa is D-Ala
  MOD_RES (29)..(29): C-terminal amidation
HXEGTFTSDYSKYLDEQAAKEFIAWLVKG

SEQ ID NO: 204 - protein, 29 aa, Artificial Sequence
  glucagon analog
  MOD_RES (2)..(2): Xaa is D-Ala
  MISC_FEATURE (12)..(16): Lactam ring between side chains at positions 12 and 16
  MOD_RES (29)..(29): C-terminal amidation
HXEGTFTSDYSKYLDEQAAKEFIAWLVKG

SEQ ID NO: 205 - protein, 29 aa, Artificial Sequence
  glucagon analog
  MOD_RES (2)..(2): Xaa is D-Ala
  MISC_FEATURE (16)..(20): Lactam ring between side chains at positions 16 and 20
  MOD_RES (29)..(29): Lactam ring between side chains at positions 16 and 20
HXEGTFTSDYSKYLDEQAAKEFIAWLVKG

SEQ ID NO: 206 - protein, 29 aa, Artificial Sequence
  glucagon analog
  MOD_RES (24)..(24): PEGYLATION
  MOD_RES (29)..(29): C-terminal amidation
HSQGTFTSDYSKYLDERRAQDFVCWLMNT

SEQ ID NO: 207 - protein, 29 aa, Artificial Sequence
  glucagon analog
  MOD_RES (24)..(24): PEGYLATION
  MOD_RES (29)..(29): C-terminal amidation
HSQGTFTSDYSKYLDERRAKDFVCWLMNT

SEQ ID NO: 208 - protein, 29 aa, Artificial Sequence
  glucagon analog
  MISC_FEATURE (16)..(20): Lactam ring between side chains at positions 16 and 20
  MOD_RES (24)..(24): PEGYLATION
  MOD_RES (29)..(29): C-terminal amidation
HSQGTFTSDYSKYLDERRAKDFVCWLMNT

SEQ ID NO: 209 - protein, 29 aa, Artificial Sequence
  glucagon analog
  MISC_FEATURE (12)..(16): Lactam ring between side chains at positions 12 and 16
  MOD_RES (24)..(24): PEGYLATION
  MOD_RES (29)..(29): C-terminal amidation
HSQGTFTSDYSKYLDERRAQDFVCWLMNT

SEQ ID NO: 210 - protein, 29 aa, Artificial Sequence
  glucagon analog
  MISC_FEATURE (12)..(16): Lactam ring between side chains at positions 12 and 16
  MOD_RES (24)..(24): PEGYLATION
  MOD_RES (29)..(29): C-terminal amidation
HSQGTFTSDYSKYLDERRAKDFVCWLMNT

SEQ ID NO: 211 - protein, 29 aa, Artificial Sequence
  glucagon analog
  MISC_FEATURE (16)..(20): Lactam ring between side chains at positions 16 and 20
  MOD_RES (24)..(24): PEGYLATION
  MOD_RES (29)..(29): C-terminal amidation
HSQGTFTSDYSKYLDKRRAEDFVCWLMNT

SEQ ID NO: 212 - protein, 29 aa, Artificial Sequence
  glucagon analog
  MISC_FEATURE (16)..(20): Lactam ring between side chains at positions 16 and 20
  MOD_RES (24)..(24): PEGYLATION
  MOD_RES (29)..(29): C-terminal amidation
HSQGTFTSDYSKYLDERAAKDFVCWLMNT

SEQ ID NO: 213 - protein, 29 aa, Artificial Sequence
  glucagon analog
  MISC_FEATURE (16)..(20): Lactam ring between side chains at positions 16 and 20
  MOD_RES (24)..(24): PEGYLATION
  MOD_RES (29)..(29): C-terminal amidation
HSQGTFTSDYSKYLDERAAKDFVCWLMNT

SEQ ID NO: 214 - protein, 29 aa, Artificial Sequence
  glucagon analog
  MISC_FEATURE (12)..(16): Lactam ring between side chains at positions 12 and 16
  MOD_RES (24)..(24): PEGYLATION
  MOD_RES (29)..(29): C-terminal amidation
HSQGTFTSDYSKYLDERAAQDFVCWLMNT

SEQ ID NO: 215 - protein, 29 aa, Artificial Sequence
  glucagon analog
  MISC_FEATURE (12)..(16): Lactam ring between side chains at positions 12 and 16
  MOD_RES (24)..(24): PEGYLATION
  MOD_RES (29)..(29): C-terminal amidation
HSQGTFTSDYSKYLDERAAKDFVCWLMNT

SEQ ID NO: 216 - protein, 29 aa, Artificial Sequence
  glucagon analog
  MISC_FEATURE (16)..(20): Lactam ring between side chains at positions 16 and 20
  MOD_RES (24)..(24): PEGYLATION
  MOD_RES (29)..(29): C-terminal amidation
HSQGTFTSDYSKYLDKRAAEDFVCWLMNT

SEQ ID NO: 217 - protein, 29 aa, Artificial Sequence
  glucagon analog
  MOD_RES (24)..(24): PEGYLATION
  MOD_RES (29)..(29): C-terminal amidation
HSQGTFTSDYSKYLDEQAAKEFICWLMNT

SEQ ID NO: 218 - protein, 29 aa, Artificial Sequence
  glucagon analog
  MISC_FEATURE (12)..(16): Lactam ring between side chains at positions 12 and 16
  MOD_RES (24)..(24): PEGYLATION
  MOD_RES (29)..(29): C-terminal amidation
HSQGTFTSDYSKYLDEQAAKEFICWLMNT

SEQ ID NO: 219 - protein, 29 aa, Artificial Sequence
  glucagon analog
  MISC_FEATURE (16)..(20): Lactam ring between side chains at positions 16 and 20
  MOD_RES (24)..(24): PEGYLATION
  MOD_RES (29)..(29): C-terminal amidation
HSQGTFTSDYSKYLDEQAAKEFICWLMNT

SEQ ID NO: 220 - protein, 29 aa, Artificial Sequence
  glucagon analog
  MOD_RES (24)..(24): PEGYLATION
  MOD_RES (29)..(29): C-terminal amidation
HSQGTFTSDYSKYLDEQAAKEFICWLVKG

SEQ ID NO: 221 - protein, 29 aa, Artificial Sequence
  glucagon analog
  MISC_FEATURE (12)..(16): Lactam ring between side chains at positions 12 and 16
  MOD_RES (24)..(24): PEGYLATION
  MOD_RES (29)..(29): C-terminal amidation
HSQGTFTSDYSKYLDEQAAKEFICWLVKG

SEQ ID NO: 222 - protein, 29 aa, Artificial Sequence
  glucagon analog
  MISC_FEATURE (16)..(20): Lactam ring between side chains at positions 16 and 20
  MOD_RES (24)..(24): PEGYLATION
  MOD_RES (29)..(29): C-terminal amidation
HSQGTFTSDYSKYLDEQAAKEFICWLVKG

SEQ ID NO: 223 - protein, 29 aa, Artificial Sequence
  glucagon analog
  MOD_RES (1)..(1): Xaa is (Des-amino)His
  MOD_RES (24)..(24): PEGYLATION
  MOD_RES (29)..(29): C-terminal amidation
XSQGTFTSDYSKYLDERRAQDFVCWLMNT

SEQ ID NO: 224 - protein, 29 aa, Artificial Sequence
  glucagon analog
  MOD_RES (1)..(1): Xaa is (Des-amino)His
  MOD_RES (24)..(24): PEGYLATION
  MOD_RES (29)..(29): C-terminal amidation
XSQGTFTSDYSKYLDERRAKDFVCWLMNT

SEQ ID NO: 225 - protein, 29 aa, Artificial Sequence
  glucagon analog
  MOD_RES (1)..(1): Xaa is (Des-amino)His
  MISC_FEATURE (16)..(20): Lactam ring between side chains at positions 16 and 20
  MOD_RES (24)..(24): PEGYLATION
  MOD_RES (29)..(29): C-terminal amidation
XSQGTFTSDYSKYLDERRAKDFVCWLMNT

SEQ ID NO: 226 - protein, 29 aa, Artificial Sequence
  glucagon analog
  MOD_RES (1)..(1): Xaa is (Des-amino)His
  MISC_FEATURE (12)..(16): Lactam ring between side chains at positions 12 and 16
  MOD_RES (24)..(24): PEGYLATION
  MOD_RES (29)..(29): C-terminal amidation
XSQGTFTSDYSKYLDERRAQDFVCWLMNT

SEQ ID NO: 227 - protein, 29 aa, Artificial Sequence
  glucagon analog
  MOD_RES (1)..(1): Xaa is (Des-amino)His
  MISC_FEATURE (12)..(16): Lactam ring between side chains at positions 12 and 16
  MOD_RES (24)..(24): PEGYLATION
  MOD_RES (29)..(29): C-terminal amidation
XSQGTFTSDYSKYLDERRAKDFVCWLMNT

SEQ ID NO: 228 - protein, 29 aa, Artificial Sequence
  glucagon analog
  MOD_RES (1)..(1): Xaa is (Des-amino)His
  MISC_FEATURE (16)..(20): Lactam ring between side chains at positions 16 and 20
  MOD_RES (24)..(24): PEGYLATION
  MOD_RES (29)..(29): C-terminal amidation
XSQGTFTSDYSKYLDKRRAEDFVCWLMNT

SEQ ID NO: 229 - protein, 29 aa, Artificial Sequence
  glucagon analog
  MOD_RES (1)..(1): Xaa is (Des-amino)His
  MOD_RES (24)..(24): PEGYLATION
  MOD_RES (29)..(29): C-terminal amidation
XSQGTFTSDYSKYLDERAAKDFVCWLMNT

SEQ ID NO: 230 - protein, 29 aa, Artificial Sequence
  glucagon analog
  MOD_RES (1)..(1): Xaa is (Des-amino)His
  MISC_FEATURE (16)..(20): Lactam ring between side chains at positions 16 and 20
  MOD_RES (24)..(24): PEGYLATION
  MOD_RES (29)..(29): C-terminal amidation
XSQGTFTSDYSKYLDERAAKDFVCWLMNT

SEQ ID NO: 231 - protein, 29 aa, Artificial Sequence
  glucagon analog
  MOD_RES (1)..(1): Xaa is (Des-amino)His
  MISC_FEATURE (12)..(16): Lactam ring between side chains at positions 12 and 16
  MOD_RES (24)..(24): PEGYLATION
  MOD_RES (29)..(29): C-terminal amidation
XSQGTFTSDYSKYLDERAAQDFVCWLMNT

SEQ ID NO: 232 - protein, 29 aa, Artificial Sequence
  glucagon analog
  MOD_RES (1)..(1): Xaa is (Des-amino)His
  MISC_FEATURE (12)..(16): Lactam ring between side chains at positions 12 and 16
  MOD_RES (24)..(24): PEGYLATION
  MOD_RES (29)..(29): C-terminal amidation
XSQGTFTSDYSKYLDERAAKDFVCWLMNT

SEQ ID NO: 233 - protein, 29 aa, Artificial Sequence
  glucagon analog
  MOD_RES (1)..(1): Xaa is (Des-amino)His
  MISC_FEATURE (16)..(20): Lactam ring between side chains at positions 16 and 20
  MOD_RES (24)..(24): PEGYLATION
  MOD_RES (29)..(29): C-terminal amidation
XSQGTFTSDYSKYLDKRAAEDFVCWLMNT

SEQ ID NO: 234 - protein, 29 aa, Artificial Sequence
  glucagon analog
  MOD_RES (1)..(1): Xaa is (Des-amino)His
  MOD_RES (24)..(24): PEGYLATION
  MOD_RES (29)..(29): C-terminal amidation
XSQGTFTSDYSKYLDEQAAKEFICWLMNT

SEQ ID NO: 235 - protein, 29 aa, Artificial Sequence
  glucagon analog
  MOD_RES (1)..(1): XAa is (Des-amino)His
  MISC_FEATURE (12)..(16): Lactam ring between side chains at positions 12 and 16
  MOD_RES (24)..(24): PEGYLATION
  MOD_RES (29)..(29): C-terminal amidation
XSQGTFTSDYSKYLDEQAAKEFICWLMNT

SEQ ID NO: 236 - protein, 29 aa, Artificial Sequence
  glucagon analog
  MOD_RES (1)..(1): Xaa is (Des-amino)His
  MISC_FEATURE (16)..(20): Lactam ring between side chains at positions 16 and 20
  MOD_RES (24)..(24): PEGYLATION
  MOD_RES (29)..(29): C-terminal amidation
XSQGTFTSDYSKYLDEQAAKEFICWLMNT

SEQ ID NO: 237 - protein, 29 aa, Artificial Sequence
  glucagon analog
  MOD_RES (1)..(1): Xaa is (Des-amino)His
  MOD_RES (24)..(24): PEGYLATION
  MOD_RES (29)..(29): C-terminal amidation
XSQGTFTSDYSKYLDEQAAKEFICWLVKG

SEQ ID NO: 238 - protein, 29 aa, Artificial Sequence
  glucagon analog
  MOD_RES (1)..(1): Xaa is (Des-amino)His
  MISC_FEATURE (12)..(16): Lactam ring between side chains at positions 12 and 16
  MOD_RES (24)..(24): PEGYLATION
  MOD_RES (29)..(29): C-terminal amidation
XSQGTFTSDYSKYLDEQAAKEFICWLVKG

SEQ ID NO: 239 - protein, 29 aa, Artificial Sequence
  glucagon analog
  MOD_RES (1)..(1): Xaa is (Des-amino)His
  MISC_FEATURE (16)..(20): Lactam ring between side chains at positions 16 and 20
  MOD_RES (24)..(24): PEGYLATION
  MOD_RES (29)..(29): C-terminal amidation
XSQGTFTSDYSKYLDEQAAKEFICWLVKG

SEQ ID NO: 240 - protein, 29 aa, Artificial Sequence
  Synthetic peptide
  MOD_RES (2)..(2): Xaa is AIB
  MOD_RES (24)..(24): PEGYLATION
  MOD_RES (29)..(29): C-terminal amidation
HXQGTFTSDYSKYLDERRAQDFVCWLMNT

SEQ ID NO: 241 - protein, 29 aa, Artificial Sequence
  Synthetic peptide
  MOD_RES (2)..(2): Xaa is AIB
  MOD_RES (24)..(24): PEGYLATION
  MOD_RES (29)..(29): C-terminal amidation
HXQGTFTSDYSKYLDERRAKDFVCWLMNT

SEQ ID NO: 242 - protein, 29 aa, Artificial Sequence
  Synthetic peptide
  MOD_RES (2)..(2): Xaa is AIB
  MISC_FEATURE (16)..(20): Lactam ring between side chains at positions 16 and 20
  MOD_RES (24)..(24): PEGYLATION
  MOD_RES (29)..(29): C-terminal amidation
HXQGTFTSDYSKYLDERRAKDFVCWLMNT

SEQ ID NO: 243 - protein, 29 aa, Artificial Sequence
  Synthetic peptide
  MOD_RES (2)..(2): Xaa is AIB
  MISC_FEATURE (12)..(16): Lactam ring between side chains at positions 12 and 16
  MOD_RES (24)..(24): PEGYLATION
  MOD_RES (29)..(29): C-terminal amidation
HXQGTFTSDYSKYLDERRAQDFVCWLMNT

SEQ ID NO: 244 - protein, 29 aa, Artificial Sequence
  Synthetic peptide
  MOD_RES (2)..(2): Xaa is AIB
  MISC_FEATURE (12)..(16): Lactam ring between side chains at positions 12 and 16
  MOD_RES (24)..(24): PEGYLATION
  MOD_RES (29)..(29): C-terminal amidation
HXQGTFTSDYSKYLDERRAKDFVCWLMNT

SEQ ID NO: 245 - protein, 29 aa, Artificial Sequence
  Synthetic peptide
  MOD_RES (2)..(2): Xaa is AIB
  MISC_FEATURE (16)..(20): Lactam ring side chains at positions 16 and 20
  MOD_RES (24)..(24): PEGYLATION
  MOD_RES (29)..(29): C-terminal amidation
HXQGTFTSDYSKYLDKRRAEDFVCWLMNT

SEQ ID NO: 246 - protein, 29 aa, Artificial Sequence
  Synthetic peptide
  MOD_RES (2)..(2): Xaa is AIB
  MOD_RES (24)..(24): PEGYLATION
  MOD_RES (29)..(29): C-terminal amidation
HXQGTFTSDYSKYLDERAAKDFVCWLMNT

SEQ ID NO: 247 - protein, 29 aa, Artificial Sequence
  Synthetic peptide
  MOD_RES (2)..(2): Xaa is AIB
  MISC_FEATURE (16)..(20): Lactam ring between side chains at positions 16 and 20
  MOD_RES (24)..(24): PEGYLATION
  MOD_RES (29)..(29): C-terminal amidation
HXQGTFTSDYSKYLDERAAKDFVCWLMNT

SEQ ID NO: 248 - protein, 29 aa, Artificial Sequence
  Synthetic peptide
  MOD_RES (2)..(2): Xaa is AIB
  MISC_FEATURE (12)..(16): Lactam ring between side chains at positions 12 and 16
  MOD_RES (24)..(24): PEGYLATION
  MOD_RES (29)..(29): C-terminal amidation
HXQGTFTSDYSKYLDERAAQDFVCWLMNT

SEQ ID NO: 249 - protein, 29 aa, Artificial Sequence
  Synthetic peptide
  MOD_RES (2)..(2): Xaa is AIB
  MISC_FEATURE (12)..(16): Lactam ring between side chains at positions 12 and 16
  MOD_RES (24)..(24): PEGYLATION
  MOD_RES (29)..(29): C-terminal amidation
HXQGTFTSDYSKYLDERAAKDFVCWLMNT

SEQ ID NO: 250 - protein, 29 aa, Artificial Sequence
  Synthetic peptide
  MOD_RES (2)..(2): Xaa is AIB
  MISC_FEATURE (12)..(16): Lactam ring between side chains at positions 12 and 16
  MOD_RES (24)..(24): PEGYLATION
  MOD_RES (29)..(29): C-terminal amidation
HXQGTFTSDYSKYLDKRAAEDFVCWLMNT

SEQ ID NO: 251 - protein, 29 aa, Artificial Sequence
  Synthetic peptide
  MOD_RES (2)..(2): Xaa is AIB
  MOD_RES (24)..(24): PEGYLATION
  MOD_RES (29)..(29): C-terminal amidation
HXQGTFTSDYSKYLDEQAAKEFICWLMNT

SEQ ID NO: 252 - protein, 29 aa, Artificial Sequence
  Synthetic peptide
  misc_feature (2)..(2): Xaa can be any naturally occurring amino acid
HXQGTFTSDYSKYLDEQAAKEFICWLMNT

SEQ ID NO: 253 - protein, 29 aa, Artificial Sequence
  Synthetic peptide
  MOD_RES (2)..(2): Xaa is AIB
  MISC_FEATURE (16)..(20): Lactam ring between side chains at positions 16 and 20
  MOD_RES (24)..(24): PEGYLATION
  MOD_RES (29)..(29): C-terminal amidation
HXQGTFTSDYSKYLDEQAAKEFICWLMNT

SEQ ID NO: 254 - protein, 29 aa, Artificial Sequence
  Synthetic peptide
  MOD_RES (2)..(2): Xaa is AIB
  MOD_RES (24)..(24): PEGYLATION
  MOD_RES (29)..(29): C-terminal amidation
HXQGTFTSDYSKYLDEQAAKEFICWLVKG

SEQ ID NO: 255 - protein, 29 aa, Artificial Sequence
  Synthetic peptide
  MOD_RES (2)..(2): Xaa is AIB
  MISC_FEATURE (12)..(16): Lactam ring between side chains at positions 12 and 16
  MOD_RES (24)..(24): PEGYLATION
  MOD_RES (29)..(29): C-terminal amidation
HXQGTFTSDYSKYLDEQAAKEFICWLVKG

SEQ ID NO: 256 - protein, 29 aa, Artificial Sequence
  Synthetic peptide
  MOD_RES (2)..(2): Xaa is AIB
  MISC_FEATURE (16)..(20): Lactam ring between side chains at positions 16 and 20
  MOD_RES (24)..(24): PEGYLATION
  MOD_RES (29)..(29): C-terminal amidation
HXQGTFTSDYSKYLDEQAAKEFICWLVKG

SEQ ID NO: 257 - protein, 29 aa, Artificial Sequence
  Synthetic peptide
  MOD_RES (2)..(2): Xaa is D-Ala
  MOD_RES (24)..(24): PEGYLATION
  MOD_RES (29)..(29): C-terminal amidation
HXQGTFTSDYSKYLDERRAQDFVCWLMNT

SEQ ID NO: 258 - protein, 29 aa, Artificial Sequence
  Synthetic peptide
  MOD_RES (2)..(2): Xaa is D-Ala
  MOD_RES (24)..(24): PEGYLATION
  MOD_RES (29)..(29): C-terminal amidation
HXQGTFTSDYSKYLDERRAKDFVCWLMNT

SEQ ID NO: 259 - protein, 29 aa, Artificial Sequence
  Synthetic peptide
  MOD_RES (2)..(2): Xaa is D-Ala
  MISC_FEATURE (16)..(20): Lactam ring between side chains at positions 16 and 20
  MOD_RES (24)..(24): PEGYLATION
  MOD_RES (29)..(29): C-terminal amidation
HXQGTFTSDYSKYLDERRAKDFVCWLMNT

SEQ ID NO: 260 - protein, 29 aa, Artificial Sequence
  Synthetic peptide
  MOD_RES (2)..(2): Xaa is D-Ala
  MISC_FEATURE (12)..(16): Lactam ring between side chrains at positions 12 and 16
  MOD_RES (24)..(24): PEGYLATION
  MOD_RES (29)..(29): C-terminal amidation
HXQGTFTSDYSKYLDERRAQDFVCWLMNT

SEQ ID NO: 261 - protein, 29 aa, Artificial Sequence
  Synthetic peptide
  MOD_RES (2)..(2): Xaa is D-Ala
  MISC_FEATURE (12)..(16): Lactam ring between side chains at positions 12 and 16
  MOD_RES (24)..(24): PEGYLATION
  MOD_RES (29)..(29): C-terminal amidation
HXQGTFTSDYSKYLDERRAKDFVCWLMNT

SEQ ID NO: 262 - protein, 29 aa, Artificial Sequence
  Synthetic peptide
  MOD_RES (2)..(2): Xaa is D-Ala
  MISC_FEATURE (16)..(20): Lactam ring between side chains at positions 16 and 20
  MOD_RES (24)..(24): PEGYLATION
  MOD_RES (29)..(29): C-terminal amidation
HXQGTFTSDYSKYLDKRRAEDFVCWLMNT

SEQ ID NO: 263 - protein, 29 aa, Artificial Sequence
  Synthetic peptide
  MOD_RES (2)..(2): Xaa is D-Ala
  MOD_RES (24)..(24): PEGYLATION
  MOD_RES (29)..(29): C-terminal amidation
HXQGTFTSDYSKYLDERAAKDFVCWLMNT

SEQ ID NO: 264 - protein, 29 aa, Artificial Sequence
  Synthetic peptide
  MOD_RES (2)..(2): Xaa is D-Ala
  MISC_FEATURE (16)..(20): Lactam ring between side chains at positions 16 and 20
  MOD_RES (24)..(24): PEGYLATION
  MOD_RES (29)..(29): C-terminal amidation
HXQGTFTSDYSKYLDERAAKDFVCWLMNT

SEQ ID NO: 265 - protein, 29 aa, Artificial Sequence
  Synthetic peptide
  MOD_RES (2)..(2): Xaa is D-Ala
  MISC_FEATURE (12)..(16): Lactam ring between side chains at positions 12 and 16
  MOD_RES (24)..(24): PEGYLATION
  MOD_RES (29)..(29): C-terminal amidation
HXQGTFTSDYSKYLDERAAQDFVCWLMNT

SEQ ID NO: 266 - protein, 29 aa, Artificial Sequence
  Synthetic peptide
  MOD_RES (2)..(2): Xaa is D-Ala
  MISC_FEATURE (12)..(16): Lactam ring betwee side chains at positions 12 and 16
  MOD_RES (24)..(24): PEGYLATION
  MOD_RES (29)..(29): C-terminal amidation
HXQGTFTSDYSKYLDERAAKDFVCWLMNT

SEQ ID NO: 267 - protein, 29 aa, Artificial Sequence
  Synthetic peptide
  MOD_RES (2)..(2): Xaa is D-Ala
  MISC_FEATURE (16)..(20): Lactam ring between side chains at positions 16 and 20
  MOD_RES (24)..(24): PEGYLATION
  MOD_RES (29)..(29): C-terminal amidation
HXQGTFTSDYSKYLDKRAAEDFVCWLMNT

SEQ ID NO: 268 - protein, 29 aa, Artificial Sequence
  Synthetic peptide
  MOD_RES (2)..(2): Xaa is D-Ala
  MOD_RES (24)..(24): PEGYLATION
  MOD_RES (29)..(29): C-terminal amidation
HXQGTFTSDYSKYLDEQAAKEFICWLMNT

SEQ ID NO: 269 - protein, 29 aa, Artificial Sequence
  Synthetic peptide
  MOD_RES (2)..(2): Xaa is D-Ala
  MISC_FEATURE (12)..(16): Lactam ring betwee side chains at positions 12 and 16
  MOD_RES (24)..(24): PEGYLATION
  MOD_RES (29)..(29): C-terminal amidation
HXQGTFTSDYSKYLDEQAAKEFICWLMNT

SEQ ID NO: 270 - protein, 29 aa, Artificial Sequence
  Synthetic peptide
  MOD_RES (2)..(2): Xaa is D-Ala
  MISC_FEATURE (16)..(20): Lactam ring betwee side chains at positions 16 and 20
  MOD_RES (24)..(24): PEGYLATION
  MOD_RES (29)..(29): C-terminal amidation
HXQGTFTSDYSKYLDEQAAKEFICWLMNT

SEQ ID NO: 271 - protein, 29 aa, Artificial Sequence
  Synthetic peptide
  MOD_RES (2)..(2): Xaa is D-Ala
  MOD_RES (24)..(24): PEGYLATION
  MOD_RES (29)..(29): C-terminal amidation
HXQGTFTSDYSKYLDEQAAKEFICWLVKG

SEQ ID NO: 272 - protein, 29 aa, Artificial Sequence
  Synthetic peptide
  MOD_RES (2)..(2): Xaa is D-Ala
  MISC_FEATURE (12)..(16): Lactam ring between side chains at positions 12 and 16
  MOD_RES (24)..(24): PEGYLATION
  MOD_RES (29)..(29): C-terminal midation
HXQGTFTSDYSKYLDEQAAKEFICWLVKG

SEQ ID NO: 273 - protein, 29 aa, Artificial Sequence
  Synthetic peptide
  MOD_RES (2)..(2): Xaa is D-Ala
  MISC_FEATURE (16)..(20): Lactam ring between side chains at positions 16 and 20
  MOD_RES (24)..(24): PEGYLATION
  MOD_RES (29)..(29): C-terminal amidation
HXQGTFTSDYSKYLDEQAAKEFICWLVKG

SEQ ID NO: 274 - protein, 29 aa, Artificial Sequence
  Synthetic peptide
  MOD_RES (24)..(24): PEGYLATION
  MOD_RES (29)..(29): C-terminal amidation
HSEGTFTSDYSKYLDERRAQDFVCWLMNT

SEQ ID NO: 275 - protein, 29 aa, Artificial Sequence
  Synthetic peptide
  MOD_RES (24)..(24): PEGYLATION
  MOD_RES (29)..(29): C-terminal amidation
HSEGTFTSDYSKYLDERRAKDFVCWLMNT

SEQ ID NO: 276 - protein, 29 aa, Artificial Sequence
  Synthetic peptide
  MISC_FEATURE (16)..(20): Lactam ring between side chains at positions 16 and 20
  MOD_RES (24)..(24): PEGYLATION
  MOD_RES (29)..(29): C-terminal amidation
HSEGTFTSDYSKYLDERRAKDFVCWLMNT

SEQ ID NO: 277 - protein, 29 aa, Artificial Sequence
  Synthetic peptide
  MISC_FEATURE (12)..(16): Lactam ring between side chains at positions 12 and 16
  MOD_RES (24)..(24): PEGYLATION
  MOD_RES (29)..(29): C-terminal amidation
HSEGTFTSDYSKYLDERRAQDFVCWLMNT

SEQ ID NO: 278 - protein, 29 aa, Artificial Sequence
  Synthetic peptide
  MISC_FEATURE (12)..(16): Lactam ring between side chains at positions 12 and 16
  MOD_RES (24)..(24): PEGYLATION
  MOD_RES (29)..(29): C-terminal amidation
HSEGTFTSDYSKYLDERRAKDFVCWLMNT

SEQ ID NO: 279 - protein, 29 aa, Artificial Sequence
  Synthetic peptide
  MISC_FEATURE (16)..(20): Lactam ring between side chains at positions 16 and 20
  MOD_RES (24)..(24): PEGYLATION
  MOD_RES (29)..(29): C-terminal amidation
HSEGTFTSDYSKYLDKRRAEDFVCWLMNT

SEQ ID NO: 280 - protein, 29 aa, Artificial Sequence
  Synthetic peptide
  MOD_RES (24)..(24): PEGYLATION
  MOD_RES (29)..(29): C-terminal amidation
HSEGTFTSDYSKYLDERAAKDFVCWLMNT

SEQ ID NO: 281 - protein, 29 aa, Artificial Sequence
  Synthetic peptide
  MISC_FEATURE (16)..(20): Lactam ring between side chains at positions 16 and 20
  MOD_RES (24)..(24): PEGYLATION
  MOD_RES (29)..(29): C-terminal amidation
HSEGTFTSDYSKYLDERAAKDFVCWLMNT

SEQ ID NO: 282 - protein, 29 aa, Artificial Sequence
  Synthetic peptide
  MISC_FEATURE (12)..(16): Lactam ring between side chains at positions 12 and 16
  MOD_RES (24)..(24): PEGYLATION
  MOD_RES (29)..(29): C-terminal amidation
HSEGTFTSDYSKYLDERAAQDFVCWLMNT

SEQ ID NO: 283 - protein, 29 aa, Artificial Sequence
  Synthetic peptide
  MISC_FEATURE (12)..(16): Lactam ring between side chains at positions 12 and 16
  MOD_RES (24)..(24): PEGYLATION
  MOD_RES (29)..(29): C-terminal amidation
HSEGTFTSDYSKYLDERAAKDFVCWLMNT

SEQ ID NO: 284 - protein, 29 aa, Artificial Sequence
  Synthetic peptide
  MISC_FEATURE (16)..(20): Lactam ring between side chains at positions 16 and 20
  MOD_RES (24)..(24): PEGYLATION
  MOD_RES (29)..(29): C-terminal amidation
HSEGTFTSDYSKYLDKRAAEDFVCWLMNT

SEQ ID NO: 285 - protein, 29 aa, Artificial Sequence
  Synthetic peptide
  MOD_RES (24)..(24): PEGYLATION
  MOD_RES (29)..(29): C-terminal amidation
HSEGTFTSDYSKYLDEQAAKEFICWLMNT

SEQ ID NO: 286 - protein, 29 aa, Artificial Sequence
  Synthetic peptide
  MISC_FEATURE (12)..(16): Lactam ring between side chains at positions 12 and 16
  MOD_RES (24)..(24): PEGYLATION
  MOD_RES (29)..(29): C-terminal amidation
HSEGTFTSDYSKYLDEQAAKEFICWLMNT

SEQ ID NO: 287 - protein, 29 aa, Artificial Sequence
  Synthetic peptide
  MISC_FEATURE (16)..(20): Lactam ring between side chain at positions 16 and 20
  MOD_RES (24)..(24): PEGYLATION
  MOD_RES (29)..(29): C-terminal amidation
HSEGTFTSDYSKYLDEQAAKEFICWLMNT

SEQ ID NO: 288 - protein, 29 aa, Artificial Sequence
  Synthetic peptide
  MOD_RES (24)..(24): PEGYLATION
  MOD_RES (29)..(29): C-terminal amidation
HSEGTFTSDYSKYLDEQAAKEFICWLVKG

SEQ ID NO: 289 - protein, 29 aa, Artificial Sequence
  Synthetic peptide
  MISC_FEATURE (12)..(16): Lactam ring between side chains at positions 12 and 16
  MOD_RES (24)..(24): PEGYLATION
  MOD_RES (29)..(29): C-terminal amidation
HSEGTFTSDYSKYLDEQAAKEFICWLVKG

SEQ ID NO: 290 - protein, 29 aa, Artificial Sequence
  Synthetic peptide
  MISC_FEATURE (16)..(20): Lactam ring between side chains at positions 16 and 20
  MOD_RES (24)..(24): PEGYLATION
  MOD_RES (29)..(29): C-terminal amidation
HSEGTFTSDYSKYLDEQAAKEFICWLVKG

SEQ ID NO: 291 - protein, 29 aa, Artificial Sequence
  Synthetic peptide
  MOD_RES (1)..(1): Xaa is (Des-amino)His
  MOD_RES (24)..(24): PEGYLATION
  MOD_RES (29)..(29): C-terminal amidation
XSEGTFTSDYSKYLDERRAQDFVCWLMNT

SEQ ID NO: 292 - protein, 29 aa, Artificial Sequence
  Synthetic peptide
  MOD_RES (1)..(1): Xaa is (Des-amino)His
  MOD_RES (24)..(24): PEGYLATION
  MOD_RES (29)..(29): C-terminal amidation
XSEGTFTSDYSKYLDERRAKDFVCWLMNT

SEQ ID NO: 293 - protein, 29 aa, Artificial Sequence
  Synthetic peptide
  MOD_RES (1)..(1): Xaa is (Des-amino)His
  MISC_FEATURE (16)..(20): Lactam ring between side chains at positions 16 and 20
  MOD_RES (24)..(24): PEGYLATION
  MOD_RES (29)..(29): C-terminal amidation
XSEGTFTSDYSKYLDERRAKDFVCWLMNT

SEQ ID NO: 294 - protein, 29 aa, Artificial Sequence
  Synthetic peptide
  MOD_RES (1)..(1): Xaa is (Des-amino)His
  MISC_FEATURE (12)..(16): Lactam ring between side chains at positions 12 and 16
  MOD_RES (24)..(24): PEGYLATION
  MOD_RES (29)..(29): C-terminal amidation
XSEGTFTSDYSKYLDERRAQDFVCWLMNT

SEQ ID NO: 295 - protein, 29 aa, Artificial Sequence
  Synthetic peptide
  MOD_RES (1)..(1): Xaa is (Des-amino)His
  MISC_FEATURE (12)..(16): Lactam ring between side chains at positions 12 and 16
  MOD_RES (24)..(24): PEGYLATION
  MOD_RES (29)..(29): C-terminal amidation
XSEGTFTSDYSKYLDERRAKDFVCWLMNT

SEQ ID NO: 296 - protein, 29 aa, Artificial Sequence
  Synthetic peptide
  MOD_RES (1)..(1): Xaa is (Des-amino)His
  MISC_FEATURE (16)..(20): Lactam ring between side chains at positions 16 and 20
  MOD_RES (24)..(24): PEGYLATION
  MOD_RES (29)..(29): C-terminal amidation
XSEGTFTSDYSKYLDKRRAEDFVCWLMNT

SEQ ID NO: 297 - protein, 29 aa, Artificial Sequence
  Synthetic peptide
  MOD_RES (1)..(1): Xaa is (Des-amino)His
  MOD_RES (24)..(24): PEGYLATION
  MOD_RES (29)..(29): C-terminal amidation
XSEGTFTSDYSKYLDERAAKDFVCWLMNT

SEQ ID NO: 298 - protein, 29 aa, Artificial Sequence
  Synthetic peptide
  MOD_RES (1)..(1): Xaa is (Des-amino)His
  MISC_FEATURE (16)..(20): Lactam ring between side chains at positions 16 and 20
  MOD_RES (24)..(24): PEGYLATION
  MOD_RES (29)..(29): C-terminal amidation
XSEGTFTSDYSKYLDERAAKDFVCWLMNT

SEQ ID NO: 299 - protein, 29 aa, Artificial Sequence
  Synthetic peptide
  MOD_RES (1)..(1): Xaa is (Des-amino)His
  MISC_FEATURE (12)..(16): Lactam ring between side chains at positions 12 and 16
  MOD_RES (24)..(24): PEGYLATION
  MOD_RES (29)..(29): C-terminal amidation
XSEGTFTSDYSKYLDERAAQDFVCWLMNT

SEQ ID NO: 300 - protein, 29 aa, Artificial Sequence
  Synthetic peptide
  MOD_RES (1)..(1): Xaa is (Des-amino)His
  MISC_FEATURE (12)..(16): Lactam ring between side chains at positions 12 and 16
  MOD_RES (24)..(24): PEGYLATION
  MOD_RES (29)..(29): C-terminal amidation
XSEGTFTSDYSKYLDERAAKDFVCWLMNT

SEQ ID NO: 301 - protein, 29 aa, Artificial Sequence
  Synthetic peptide
  MISC_FEATURE: c-term amidation
  MOD_RES (1)..(1): (Des-amino)His
  MISC_FEATURE (16)..(20): Lactam ring between side chains at positions 16 and 20
  MOD_RES (24)..(24): Cys-PEG
XSEGTFTSDYSKYLDKRAAEDFVCWLMNT

SEQ ID NO: 302 - protein, 29 aa, Artificial Sequence
  Synthetic peptide
  MISC_FEATURE: c-term amidation
  MOD_RES (1)..(1): (Des-amino)His
  MOD_RES (24)..(24): Cys-PEG
XSEGTFTSDYSKYLDEQAAKGFICWLMNT

SEQ ID NO: 303 - protein, 29 aa, Artificial Sequence
  Synthetic peptide
  MISC_FEATURE: c-term amidation
  MOD_RES (1)..(1): (Des-amino)His
  MISC_FEATURE (12)..(16): Lactam ring between side chains at positions 12 and 16
  MOD_RES (24)..(24): Cys-PEG
XSEGTFTSDYSKYLDEQAAKGFICWLMNT

SEQ ID NO: 304 - protein, 29 aa, Artificial Sequence
  Synthetic peptide
  MISC_FEATURE: c-term amidation
  MOD_RES (1)..(1): (Des-amino)His
  MISC_FEATURE (16)..(20): Lactam ring between side chains at positions 16 and 20
  MOD_RES (24)..(24): Cys-PEG
XSEGTFTSDYSKYLDEQAAKGFICWLMNT

SEQ ID NO: 305 - protein, 29 aa, Artificial Sequence
  Synthetic peptide
  MISC_FEATURE: c-term amidation
  MOD_RES (1)..(1): (des-amino)His
  MOD_RES (24)..(24): Cys-PEG
XSEGTFTSDYSKYLDEQAAKGFICWLVKG

SEQ ID NO: 306 - protein, 29 aa, Artificial Sequence
  Synthetic peptide
  MISC_FEATURE: c-term amidation
  MOD_RES (1)..(1): (Des-amino)His
  MISC_FEATURE (12)..(16): Lactam ring between side chains at positions 12 and 16
  MOD_RES (24)..(24): Cys-PEG
XSEGTFTSDYSKYLDEQAAKGFICWLVKG

SEQ ID NO: 307 - protein, 29 aa, Artificial Sequence
  Synthetic peptide
  MISC_FEATURE: c-term amidation
  MOD_RES (1)..(1): (Des-amino)His
  MISC_FEATURE (16)..(20): Lactam ring between side chains at positions 16 and 20
  MOD_RES (24)..(24): Cys-PEG
XSEGTFTSDYSKYLDEQAAKGFICWLVKG

SEQ ID NO: 308 - protein, 29 aa, Artificial Sequence
  Synthetic peptide
  MISC_FEATURE: c-term amidation
  MOD_RES (2)..(2): Aminoisobutyric acid
  MOD_RES (24)..(24): Cys-PEG
HXEGTFTSDYSKYLDERRAQDFVCWLMNT

SEQ ID NO: 309 - protein, 29 aa, Artificial Sequence
  Synthetic peptide
  MISC_FEATURE: c-term amidation
  MOD_RES (2)..(2): Aminoisobutyric acid
  MOD_RES (24)..(24): Cys-PEG
HXEGTFTSDYSKYLDERRAKDFVCWLMNT

SEQ ID NO: 310 - protein, 29 aa, Artificial Sequence
  Synthetic peptide
  MISC_FEATURE: c-term amidation
  MOD_RES (2)..(2): Aminoisobutyric acid
  MISC_FEATURE (16)..(20): Lactam ring between side chains at positions 16 and 20
  MOD_RES (24)..(24): Cys-PEG
HXEGTFTSDYSKYLDERRAKDFVCWLMNT

SEQ ID NO: 311 - protein, 29 aa, Artificial Sequence
  Synthetic peptide
  MISC_FEATURE: c-term amidation
  MOD_RES (2)..(2): Aminoisobutyric acid
  MISC_FEATURE (12)..(16): Lactam ring between side chain at positions 12 and 16
  MOD_RES (24)..(24): Cys-PEG
HXEGTFTSDYSKYLDERRAQDFVCWLMNT

SEQ ID NO: 312 - protein, 29 aa, Artificial Sequence
  Synthetic peptide
  MISC_FEATURE: c-term amidation
  MOD_RES (2)..(2): Aminoisobutyric acid
  MISC_FEATURE (12)..(16): Lactam ring between side chains at positions 12 and 16
  MOD_RES (24)..(24): Cys-PEG
HXEGTFTSDYSKYLDERRAKDFVCWLMNT

SEQ ID NO: 313 - protein, 29 aa, Artificial Sequence
  Synthetic peptide
  MISC_FEATURE: c-term amidation
  MOD_RES (2)..(2): Aminoisobutyric acid
  MISC_FEATURE (16)..(20): Lactam ring between side chains at positions 16 and 20
  MOD_RES (24)..(24): Cys-PEG
HXEGTFTSDYSKYLDKRRAEDFVCWLMNT

SEQ ID NO: 314 - protein, 29 aa, Artificial Sequence
  Synthetic peptide
  MISC_FEATURE: c-term amidation
  MOD_RES (2)..(2): Aminoisobutyric acid
  MOD_RES (24)..(24): Cys-PEG
HXEGTFTSDYSKYLDERAAKDFVCWLMNT

SEQ ID NO: 315 - protein, 29 aa, Artificial Sequence
  Synthetic peptide
  MISC_FEATURE: c-term amidation
  MOD_RES (2)..(2): Aminoisobutyric acid
  MISC_FEATURE (16)..(20): Lactam ring between seide chains at positions 16 and 20
  MOD_RES (24)..(24): Cys-PEG
HXEGTFTSDYSKYLDERAAKDFVCWLMNT

SEQ ID NO: 316 - protein, 29 aa, Artificial Sequence
  Synthetic peptide
  MISC_FEATURE: c-term amidation
  MOD_RES (2)..(2): Aminoisobutyric acid
  MISC_FEATURE (12)..(16): Lactam ring between side chains at positions 12 and 16
  MOD_RES (24)..(24): Cys-PEG
HXEGTFTSDYSKYLDERAAQDFVCWLMNT

SEQ ID NO: 317 - protein, 29 aa, Artificial Sequence
  Synthetic peptide
  MISC_FEATURE: c-term amidation
  MOD_RES (2)..(2): Aminoisobutyric acid
  MISC_FEATURE (12)..(16): Lactam ring between side chains at positions 12 and 16
  MOD_RES (24)..(24): Cys-PEG
HXEGTFTSDYSKYLDERAAKDFVCWLMNT

SEQ ID NO: 318 - protein, 29 aa, Artificial Sequence
  Synthetic peptide
  MISC_FEATURE: c-term amidation
  MOD_RES (2)..(2): Aminoisobutyric acid
  MISC_FEATURE (16)..(20): Lactam ring between side chains at positions 16 and 20
  MOD_RES (24)..(24): Cys-PEG
HXEGTFTSDYSKYLDKRAAEDFVCWLMNT

SEQ ID NO: 319 - protein, 29 aa, Artificial Sequence
  Synthetic peptide
  MISC_FEATURE: c-term amidation
  MOD_RES (2)..(2): Aminoisobutyric acid
  MOD_RES (24)..(24): Cys-PEG
HXEGTFTSDYSKYLDEQAAKEFICWLMNT

SEQ ID NO: 320 - protein, 29 aa, Artificial Sequence
  Synthetic peptide
  MISC_FEATURE: c-term amidation
  MOD_RES (2)..(2): Aminoisobutyric acid
  MISC_FEATURE (12)..(16): Lactam ring between side chains at positions 12 and 16
  MOD_RES (24)..(24): Cys-PEG
HXEGTFTSDYSKYLDEQAAKEFICWLMNT

SEQ ID NO: 321 - protein, 29 aa, Artificial Sequence
  Synthetic peptide
  MISC_FEATURE: c-term amidation
  MOD_RES (2)..(2): Aminoisobutyric acid
  MISC_FEATURE (16)..(20): Lactam ring between side chains at position 16 and 20
  MOD_RES (24)..(24): Cys-PEG
HXEGTFTSDYSKYLDEQAAKEFICWLMNT

SEQ ID NO: 322 - protein, 29 aa, Artificial Sequence
  Synthetic peptide
  MISC_FEATURE: c-term amidation
  MOD_RES (2)..(2): Aminoisobutyric acid
  MOD_RES (24)..(24): Cys-PEG
HXEGTFTSDYSKYLDEQAAKEFICWLVKG

SEQ ID NO: 323 - protein, 29 aa, Artificial Sequence
  Synthetic peptide
  MISC_FEATURE: c-term amidation
  MOD_RES (2)..(2): Aminoisobutyric acid
  MISC_FEATURE (12)..(16): Lactam ring between side chains at positions 12 and 16
  MOD_RES (24)..(24): Cys-PEG
HXEGTFTSDYSKYLDEQAAKEFICWLVKG

SEQ ID NO: 324 - protein, 29 aa, Artificial Sequence
  Synthetic peptide
  MISC_FEATURE: c-term amidation
  MOD_RES (2)..(2): Aminoisobutyric acid
  MISC_FEATURE (16)..(20): Lactam ring between side chains at position 16 and 20
  MOD_RES (24)..(24): Cys-PEG
HXEGTFTSDYSKYLDEQAAKEFICWLVKG

SEQ ID NO: 325 - protein, 29 aa, Artificial Sequence
  Synthetic peptide
  MISC_FEATURE: c-term amidation
  MOD_RES (2)..(2): D-Ala
  MOD_RES (24)..(24): Cys-PEG
HXEGTFTSDYSKYLDERRAQDFVCWLMNT

SEQ ID NO: 326 - protein, 29 aa, Artificial Sequence
  Synthetic peptide
  MISC_FEATURE: c-term amidation
  MOD_RES (2)..(2): D-Ala
  MOD_RES (24)..(24): Cys-PEG
HXEGTFTSDYSKYLDERRAKDFVCWLMNT

SEQ ID NO: 327 - protein, 29 aa, Artificial Sequence
  Synthetic peptide
  MISC_FEATURE: c-term amidation
  MOD_RES (2)..(2): D-Ala
  MISC_FEATURE (16)..(20): Lactam ring between side chains at positions 16 and 20
  MOD_RES (24)..(24): Cys-PEG
HXEGTFTSDYSKYLDERRAKDFVCWLMNT

SEQ ID NO: 328 - protein, 29 aa, Artificial Sequence
  Synthetic peptide
  MISC_FEATURE: c-term amidation
  MOD_RES (2)..(2): D-Ala
  MISC_FEATURE (12)..(16): Lactam between side chains at positions 12 and 16
  MOD_RES (24)..(24): Cys-PEG
HXEGTFTSDYSKYLDERRAQDFVCWLMNT

SEQ ID NO: 329 - protein, 29 aa, Artificial Sequence
  Synthetic peptide
  MISC_FEATURE: c-term amidation
  MOD_RES (2)..(2): D-Ala
  MISC_FEATURE (12)..(16): Lactam ring between side chains at positions 12 and 16
  MOD_RES (24)..(24): Cys-PEG
HXEGTFTSDYSKYLDERRAKDFVCWLMNT

SEQ ID NO: 330 - protein, 29 aa, Artificial Sequence
  Synthetic peptide
  MISC_FEATURE: c-term amidation
  MOD_RES (2)..(2): D-Ala
  MISC_FEATURE (16)..(20): Lactam ring between side chains at positions 16 and 20
  MOD_RES (24)..(24): Cys-PEG
HXEGTFTSDYSKYLDKRRAEDFVCWLMNT

SEQ ID NO: 331 - protein, 29 aa, Artificial Sequence
  Synthetic peptide
  MISC_FEATURE: c-term amidation
  MOD_RES (2)..(2): D-Ala
  MOD_RES (24)..(24): Cys-PEG
HXEGTFTSDYSKYLDERAAKDFVCWLMNT

SEQ ID NO: 332 - protein, 29 aa, Artificial Sequence
  Synthetic peptide
  MISC_FEATURE: c-term amidation
  MOD_RES (2)..(2): D-Ala
  MISC_FEATURE (16)..(20): Lactam ring between side chains at positions 16 and 20
  MOD_RES (24)..(24): Cys-PEG
HXEGTFTSDYSKYLDERAAKDFVCWLMNT

SEQ ID NO: 333 - protein, 29 aa, Artificial Sequence
  Synthetic peptide
  MISC_FEATURE: c-term amidation
  MOD_RES (2)..(2): D-Ala
  MISC_FEATURE (12)..(16): Lactam ring between side chains at positions 12 and 16
  MOD_RES (24)..(24): Cys-PEG
HXEGTFTSDYSKYLDERAAQDFVCWLMNT

SEQ ID NO: 334 - protein, 29 aa, Artificial Sequence
  Synthetic peptide
  MISC_FEATURE: c-term amidation
  MOD_RES (2)..(2): D-Ala
  MISC_FEATURE (12)..(16): Lactam ring between side chains at positions 12 and 16
  MOD_RES (24)..(24): Cys-PEG
HXEGTFTSDYSKYLDERAAKDFVCWLMNT

SEQ ID NO: 335 - protein, 29 aa, Artificial Sequence
  Synthetic peptide
  MISC_FEATURE: c-term amidation
  MOD_RES (2)..(2): D-Ala
  MISC_FEATURE (12)..(16): Lactam ring between side chainst at positions 16 and 20
  MOD_RES (24)..(24): Cys-PEG
HXEGTFTSDYSKYLDKRAAEDFVCWLMNT

SEQ ID NO: 336 - protein, 29 aa, Artificial Sequence
  Synthetic peptide
  MISC_FEATURE: c-term amidation
  MOD_RES (2)..(2): D-Ala
  MOD_RES (24)..(24): Cys-PEG
HXEGTFTSDYSKYLDEQAAKEFICWLMNT

SEQ ID NO: 337 - protein, 29 aa, Artificial Sequence
  Synthetic peptide
  MISC_FEATURE: c-term amidation
  MOD_RES (2)..(2): D-Ala
  MISC_FEATURE (12)..(16): Lactam ring between side chains at positions 12 and 16
  MOD_RES (24)..(24): Cys-PEG
HXEGTFTSDYSKYLDEQAAKEFICWLMNT

SEQ ID NO: 338 - protein, 29 aa, Artificial Sequence
  Synthetic peptide
  MISC_FEATURE: c-term amidation
  MOD_RES (2)..(2): D-Ala
  MISC_FEATURE (16)..(20): Lactam right between side chains at positions 16 and 20
  MOD_RES (24)..(24): Cys-PEG
HXEGTFTSDYSKYLDEQAAKEFICWLMNT

SEQ ID NO: 339 - protein, 29 aa, Artificial Sequence
  Synthetic peptide
  MISC_FEATURE: c-term amidation
  MOD_RES (2)..(2): D-Ala
  MOD_RES (24)..(24): Cys-PEG
HXEGTFTSDYSKYLDEQAAKEFICWLVKG

SEQ ID NO: 340 - protein, 29 aa, Artificial Sequence
  Synthetic peptide
  MISC_FEATURE: c-term amidation
  MOD_RES (2)..(2): D-Ala
  MISC_FEATURE (12)..(16): Lactam ring between side chains at positions 12 and 16
  MOD_RES (24)..(24): Cys-PEG
HXEGTFTSDYSKYLDEQAAKEFICWLVKG

SEQ ID NO: 341 - protein, 29 aa, Artificial Sequence
  Synthetic peptide
  MISC_FEATURE: c-term amidation
  MOD_RES (2)..(2): D-Ala
  MISC_FEATURE (16)..(20): Lactam ring between side chains at positions 16 and 20
  MOD_RES (24)..(24): Cys-PEG
HXEGTFTSDYSKYLDEQAAKEFICWLVKG

SEQ ID NO: 342 - protein, 29 aa, Artificial Sequence
  Synthetic peptide
  MISC_FEATURE: c-term amidation
  MOD_RES (16)..(16): Cys-PEG
HSQGTFTSDYSKYLDCRRAKDFVQWLMNT

SEQ ID NO: 343 - protein, 29 aa, Artificial Sequence
  Synthetic peptide
  MISC_FEATURE: c-term amidation
  MOD_RES (16)..(16): Cys-PEG
HSQGTFTSDYSKYLDCRAAKDFVQWLMNT

SEQ ID NO: 344 - protein, 29 aa, Artificial Sequence
  Synthetic peptide
  MISC_FEATURE: c-term amidation
  MOD_RES (16)..(16): Cys-PEG
HSQGTFTSDYSKYLDCQAAKEFIAWLMNT

SEQ ID NO: 345 - protein, 29 aa, Artificial Sequence
  Synthetic peptide
  MISC_FEATURE: c-term amidation
  MOD_RES (16)..(16): Cys-PEG
HSQGTFTSDYSKYLDCQAAKEFIAWLVKG

SEQ ID NO: 346 - protein, 29 aa, Artificial Sequence
  Synthetic peptide
  MISC_FEATURE: c-term amidation
  MOD_RES (1)..(1): (Des-amino)His
  MOD_RES (16)..(16): Cys-PEG
XSQGTFTSDYSKYLDCRRAKDFVQWLMNT

SEQ ID NO: 347 - protein, 29 aa, Artificial Sequence
  Synthetic peptide
  MISC_FEATURE: c-term amidation
  MOD_RES (1)..(1): (Des-amino)His
  MOD_RES (16)..(16): Cys-PEG
XSQGTFTSDYSKYLDCRAAKDFVQWLMNT

SEQ ID NO: 348 - protein, 29 aa, Artificial Sequence
  Synthetic peptide
  MISC_FEATURE: c-term amidation
  MOD_RES (1)..(1): (Des-amino)His
  MOD_RES (16)..(16): Cys-PEG
XSQGTFTSDYSKYLDCQAAKEFIAWLMNT

SEQ ID NO: 349 - protein, 29 aa, Artificial Sequence
  Synthetic peptide
  MISC_FEATURE: c-term amidation
  MOD_RES (1)..(1): (Des-amino)His
  MOD_RES (16)..(16): Cys-PEG
XSQGTFTSDYSKYLDCQAAKEFIAWLVKG

SEQ ID NO: 350 - protein, 29 aa, Artificial Sequence
  Synthetic peptide
  MISC_FEATURE: c-term amidation
  MOD_RES (1)..(1): (Des-amino)His
  MOD_RES (16)..(16): Cys-PEG
XSQGTFTSDYSKYLDCQAAKEFIAWLMNT

SEQ ID NO: 351 - protein, 29 aa, Artificial Sequence
  Synthetic peptide
  MISC_FEATURE: c-term amidation
  MOD_RES (2)..(2): Aminoisobutyric acid
  MOD_RES (16)..(16): Cys-PEG
HXQGTFTSDYSKYLDCRAAKDFVQWLMNT

SEQ ID NO: 352 - protein, 29 aa, Artificial Sequence
  Synthetic peptide
  MISC_FEATURE: c-term amidation
  MOD_RES (2)..(2): Aminoisobutyric acid
  MOD_RES (16)..(16): Cys-PEG
HXQGTFTSDYSKYLDCQAAKEFIAWLMNT

SEQ ID NO: 353 - protein, 29 aa, Artificial Sequence
  Synthetic peptide
  MISC_FEATURE: c-term amidation
  MOD_RES (2)..(2): Aminoisobutyric acid
  MOD_RES (16)..(16): Cys-PEG
HXQGTFTSDYSKYLDCQAAKEFIAWLVKG

SEQ ID NO: 354 - protein, 29 aa, Artificial Sequence
  Synthetic peptide
  MISC_FEATURE: c-term amidation
  MOD_RES (2)..(2): D-Ala
  MOD_RES (16)..(16): Cys-PEG
HXQGTFTSDYSKYLDCRRAKDFVQWLMNT

SEQ ID NO: 355 - protein, 29 aa, Artificial Sequence
  Synthetic peptide
  MISC_FEATURE: c-term amidation
  MOD_RES (2)..(2): D-Ala
  MOD_RES (16)..(16): Cys-PEG
HXQGTFTSDYSKYLDCRAAKDFVQWLMNT

SEQ ID NO: 356 - protein, 29 aa, Artificial Sequence
  Synthetic peptide
  MISC_FEATURE: c-term amidation
  MOD_RES (2)..(2): D-Ala
  MOD_RES (16)..(16): Cys-PEG
HXQGTFTSDYSKYLDCQAAKEFIAWLMNT

SEQ ID NO: 357 - protein, 29 aa, Artificial Sequence
  Synthetic peptide
  MISC_FEATURE: c-term amidation
  MOD_RES (2)..(2): D-Ala
  MOD_RES (16)..(16): Cys-PEG
HXQGTFTSDYSKYLDCQAAKEFIAWLVKG

SEQ ID NO: 358 - protein, 29 aa, Artificial Sequence
  Synthetic peptide
  MISC_FEATURE: c-term amidation
  MOD_RES (16)..(16): Cys-PEG
HSEGTFTSDYSKYLDCRRAKDFVQWLMNT

SEQ ID NO: 359 - protein, 29 aa, Artificial Sequence
  Synthetic peptide
  MISC_FEATURE: c-term amidation
  MOD_RES (16)..(16): Cys-PEG
HSEGTFTSDYSKYLDCRAAKDFVQWLMNT

SEQ ID NO: 360 - protein, 29 aa, Artificial Sequence
  Synthetic peptide
  MISC_FEATURE: c-term amidation
  MOD_RES (16)..(16): Cys-PEG
HSEGTFTSDYSKYLDCQAAKEFIAWLMNT

SEQ ID NO: 361 - protein, 29 aa, Artificial Sequence
  Synthetic peptide
  MISC_FEATURE: c-term amidation
  MOD_RES (16)..(16): Cys-PEG
HSEGTFTSDYSKYLDCQAAKEFIAWLVKG

SEQ ID NO: 362 - protein, 29 aa, Artificial Sequence
  Synthetic peptide
  MISC_FEATURE: c-term amidation
  MOD_RES (1)..(1): (Des-amino)His
  MOD_RES (16)..(16): Cys-PEG
XSEGTFTSDYSKYLDCRRAKDFVQWLMNT

SEQ ID NO: 363 - protein, 29 aa, Artificial Sequence
  Synthetic peptide
  MISC_FEATURE: c-term amidation
  MOD_RES (1)..(1): (Des-amino)His
  MOD_RES (16)..(16): Cys-PEG
XSEGTFTSDYSKYLDCRAAKDFVQWLMNT

SEQ ID NO: 364 - protein, 29 aa, Artificial Sequence
  Synthetic peptide
  MISC_FEATURE: c-term amidation
  MOD_RES (1)..(1): (Des-amino)His
  MOD_RES (16)..(16): Cys-PEG
XSEGTFTSDYSKYLDCQAAKEFIAWLMNT

SEQ ID NO: 365 - protein, 29 aa, Artificial Sequence
  Synthetic peptide
  MISC_FEATURE: c-term amidation
  MOD_RES (1)..(1): (Des-amino)His
  MOD_RES (16)..(16): Cys-PEG
XSEGTFTSDYSKYLDCQAAKEFIAWLVKG

SEQ ID NO: 366 - protein, 29 aa, Artificial Sequence
  Synthetic peptide
  MISC_FEATURE: c-term amidation
  MOD_RES (2)..(2): D-Ala
  MOD_RES (16)..(16): Cys-PEG
HXEGTFTSDYSKYLDCRRAKDFVQWLMNT

SEQ ID NO: 367 - protein, 29 aa, Artificial Sequence
  Synthetic peptide
  MISC_FEATURE: c-term amidation
  MOD_RES (2)..(2): D-Ala
  MOD_RES (16)..(16): Cys-PEG
HXEGTFTSDYSKYLDCRAAKDFVQWLMNT

SEQ ID NO: 368 - protein, 29 aa, Artificial Sequence
  Synthetic peptide
  MISC_FEATURE: c-term amidation
  MOD_RES (2)..(2): D-Ala
  MOD_RES (16)..(16): Cys-PEG
HXEGTFTSDYSKYLDCQAAKEFIAWLMNT

SEQ ID NO: 369 - protein, 29 aa, Artificial Sequence
  Synthetic peptide
  MISC_FEATURE: c-term amidation
  MOD_RES (2)..(2): D-Ala
  MOD_RES (16)..(16): Cys-PEG
HXEGTFTSDYSKYLDCQAAKEFIAWLVKG

SEQ ID NO: 370 - protein, 29 aa, Artificial Sequence
  Synthetic peptide
  MISC_FEATURE: c-term amidation
  MOD_RES (2)..(2): D-Ala
  MOD_RES (16)..(16): Cys-PEG
HXEGTFTSDYSKYLDCRRAKDFVQWLMNT

SEQ ID NO: 371 - protein, 29 aa, Artificial Sequence
  Synthetic peptide
  MISC_FEATURE: c-term amidation
  MOD_RES (2)..(2): D-Ala
  MOD_RES (16)..(16): Cys-PEG
HXEGTFTSDYSKYLDCRAAKDFVQWLMNT

SEQ ID NO: 372 - protein, 29 aa, Artificial Sequence
  Synthetic peptide
  MISC_FEATURE: c-term amidation
  MOD_RES (2)..(2): D-Ala
  MOD_RES (16)..(16): Cys-PEG
HXEGTFTSDYSKYLDCQAAKEFIAWLMNT

SEQ ID NO: 373 - protein, 29 aa, Artificial Sequence
  Synthetic peptide
  MISC_FEATURE: c-term amidation
  MOD_RES (2)..(2): D-Ala
  MOD_RES (16)..(16): Cys-PEG
HXEGTFTSDYSKYLDCQAAKEFIAWLVKG

SEQ ID NO: 374 - protein, 29 aa, Artificial Sequence
  Synthetic peptide
  MISC_FEATURE: c-term amidation
HSQGTFTSDYSKYLDERRAQDFVQWLMDT

SEQ ID NO: 375 - protein, 29 aa, Artificial Sequence
  Synthetic peptide
  MISC_FEATURE: c-term amidation
HSQGTFTSDYSKYLDERRAKDFVQWLMDT

SEQ ID NO: 376 - protein, 29 aa, Artificial Sequence
  Synthetic peptide
  MISC_FEATURE: c-term amidation
  MISC_FEATURE (16)..(20): Lactam ring between side chains at positions 16 and 20
HSQGTFTSDYSKYLDERRAKDFVQWLMDT

SEQ ID NO: 377 - protein, 29 aa, Artificial Sequence
  Synthetic peptide
  MISC_FEATURE: c-term amidation
  MISC_FEATURE (12)..(16): Lactam ring between side chains at positions 12 and 16
HSQGTFTSDYSKYLDERRAQDFVQWLMDT

SEQ ID NO: 378 - protein, 29 aa, Artificial Sequence
  Synthetic peptide
  MISC_FEATURE: c-term amidation
  MISC_FEATURE (12)..(16): Lactam ring between side chains at positions 12 and 16
HSQGTFTSDYSKYLDERRAKDFVQWLMDT

SEQ ID NO: 379 - protein, 29 aa, Artificial Sequence
  Synthetic peptide
  MISC_FEATURE: c-term amidation
  MISC_FEATURE (16)..(20): Lactam ring between side chains at positions 16 and 20
HSQGTFTSDYSKYLDKRRAEDFVQWLMDT

SEQ ID NO: 380 - protein, 29 aa, Artificial Sequence
  Synthetic peptide
  MISC_FEATURE: c-term amidation
HSQGTFTSDYSKYLDERAAKDFVQWLMDT

SEQ ID NO: 381 - protein, 29 aa, Artificial Sequence
  Synthetic peptide
  MISC_FEATURE: c-term amidation; lactam ring between side chains at positions 16 and 20
HSQGTFTSDYSKYLDERAAKDFVQWLMDT

SEQ ID NO: 382 - protein, 29 aa, Artificial Sequence
  Synthetic peptide
  MISC_FEATURE: c-term amidation
  MISC_FEATURE (12)..(16): Lactam ring between side chains at positions 12 and 16
HSQGTFTSDYSKYLDERAAQDFVQWLMDT

SEQ ID NO: 383 - protein, 29 aa, Artificial Sequence
  Synthetic peptide
  MISC_FEATURE: c-term amidation
  MISC_FEATURE (12)..(16): Lactam ring between side chains at positions 12 and 16
HSQGTFTSDYSKYLDERAAKDFVQWLMDT

SEQ ID NO: 384 - protein, 29 aa, Artificial Sequence
  Synthetic peptide
  MISC_FEATURE: c-term amidation
  MISC_FEATURE (16)..(20): Lactam ring between side chains at positions 16 and 20
HSQGTFTSDYSKYLDKRAAEDFVQWLMDT

SEQ ID NO: 385 - protein, 29 aa, Artificial Sequence
  Synthetic peptide
  MISC_FEATURE: c-term amidation
HSQGTFTSDYSKYLDEQAAKEFIAWLMDT

SEQ ID NO: 386 - protein, 29 aa, Artificial Sequence
  Synthetic peptide
  MISC_FEATURE: c-term amidation
  MISC_FEATURE (12)..(16): Lactam ring between side chains at positions 12 and 16
HSQGTFTSDYSKYLDEQAAKEFIAWLMDT

SEQ ID NO: 387 - protein, 29 aa, Artificial Sequence
  Synthetic peptide
  MISC_FEATURE: c-term amidation
  MISC_FEATURE (16)..(20): Lactam ring between side chains at positions 16 and 20
HSQGTFTSDYSKYLDEQAAKEFIAWLMDT

SEQ ID NO: 388 - protein, 29 aa, Artificial Sequence
  Synthetic peptide
  MISC_FEATURE: c-term amidation
  MOD_RES (1)..(1): (Des-amino)His
XSQGTFTSDYSKYLDERRAQDFVQWLMDT

SEQ ID NO: 389 - protein, 29 aa, Artificial Sequence
  Synthetic peptide
  MISC_FEATURE: c-term amidation
  MOD_RES (1)..(1): (Des-amino)His
XSQGTFTSDYSKYLDERRAKDFVQWLMDT

SEQ ID NO: 390 - protein, 29 aa, Artificial Sequence
  Synthetic peptide
  MISC_FEATURE: c-term amidation
  MOD_RES (1)..(1): (Des-amino)His
  MISC_FEATURE (16)..(20): Lactam ring between side chains at positions 16 and 20
XSQGTFTSDYSKYLDERRAKDFVQWLMDT

SEQ ID NO: 391 - protein, 29 aa, Artificial Sequence
  Synthetic peptide
  MISC_FEATURE: c-term amidation
  MOD_RES (1)..(1): (Des-amino)His
  MISC_FEATURE (12)..(16): Lactam ring between side chains at positions 12 and 16
XSQGTFTSDYSKYLDERRAQDFVQWLMDT

SEQ ID NO: 392 - protein, 29 aa, Artificial Sequence
  Synthetic peptide
  misc_feature (1)..(1): Xaa can be any naturally occurring amino acid
XSQGTFTSDYSKYLDERRAKDFVQWLMDT

SEQ ID NO: 393 - protein, 29 aa, Artificial Sequence
  Synthetic peptide
  MISC_FEATURE: c-term amidation
  MOD_RES (1)..(1): (Des-amino)His
  MISC_FEATURE (16)..(20): Lactam ring between side chains at positions 16 and 20
XSQGTFTSDYSKYLDKRRAEDFVQWLMDT

SEQ ID NO: 394 - protein, 29 aa, Artificial Sequence
  Synthetic peptide
  MISC_FEATURE: c-term amidation
  MOD_RES (1)..(1): (Des-amino)His
XSQGTFTSDYSKYLDERAAKDFVQWLMDT

SEQ ID NO: 395 - protein, 29 aa, Artificial Sequence
  Synthetic peptide
  MISC_FEATURE: c-term amidation
  MOD_RES (1)..(1): (Des-amino)His
  MISC_FEATURE (16)..(20): Lactam ring between side chains at positions 16 and 20
XSQGTFTSDYSKYLDERAAKDFVQWLMDT

SEQ ID NO: 396 - protein, 29 aa, Artificial Sequence
  Synthetic peptide
  MISC_FEATURE: c-term amidation
  MOD_RES (1)..(1): (Des-amino)His
  MISC_FEATURE (12)..(16): Lactam ring between side chains at positions 12 and 16
XSQGTFTSDYSKYLDERAAQDFVQWLMDT

SEQ ID NO: 397 - protein, 29 aa, Artificial Sequence
  Synthetic peptide
  MISC_FEATURE: c-term amidation
  MOD_RES (1)..(1): (Des-amino)His
  MISC_FEATURE (12)..(16): Lactam ring between side chains at positions 12 and 16
XSQGTFTSDYSKYLDERAAKDFVQWLMDT

SEQ ID NO: 398 - protein, 29 aa, Artificial Sequence
  Synthetic peptide
  MISC_FEATURE: c-term amidation
  MOD_RES (1)..(1): (Des-amino)His
  MISC_FEATURE (16)..(20): Lactam ring between side chains at positions 16 and 20
XSQGTFTSDYSKYLDKRAAEDFVQWLMDT

SEQ ID NO: 399 - protein, 29 aa, Artificial Sequence
  Synthetic peptide
  MISC_FEATURE: c-term amidation
  MOD_RES (1)..(1): (Des-amino)His
XSQGTFTSDYSKYLDEQAAKEFIAWLMDT

SEQ ID NO: 400 - protein, 29 aa, Artificial Sequence
  Synthetic peptide
  MISC_FEATURE: c-term amidation
  MOD_RES (1)..(1): (Des-amino)His
  MISC_FEATURE (12)..(16): Lactam ring between side chains at positions 12 and 16
XSQGTFTSDYSKYLDEQAAKEFIAWLMDT

SEQ ID NO: 401 - protein, 29 aa, Artificial Sequence
  Synthetic peptide
  MISC_FEATURE: c-term amidation
  MOD_RES (1)..(1): (Des-amino)His
  MISC_FEATURE (16)..(20): Lactam ring between side chains at positions 16 and 20
XSQGTFTSDYSKYLDEQAAKEFIAWLMDT

SEQ ID NO: 402 - protein, 29 aa, Artificial Sequence
  Synthetic peptide
  MISC_FEATURE: c-term amidation
  MOD_RES (2)..(2): Aminoisobutyric acid
HXQGTFTSDYSKYLDERRAQDFVQWLMDT

SEQ ID NO: 403 - protein, 29 aa, Artificial Sequence
  Synthetic peptide
  MISC_FEATURE: c-term amidation
  MOD_RES (2)..(2): Aminoisobutyric acid
HXQGTFTSDYSKYLDERRAKDFVQWLMDT

SEQ ID NO: 404 - protein, 29 aa, Artificial Sequence
  Synthetic peptide
  MISC_FEATURE: c-term amidation
  MOD_RES (2)..(2): Aminoisobutyric acid
  MISC_FEATURE (16)..(20): Lactam ring between side chains at positions 16 and 20
HXQGTFTSDYSKYLDERRAKDFVQWLMDT

SEQ ID NO: 405 - protein, 29 aa, Artificial Sequence
  Synthetic peptide
  MISC_FEATURE: c-term amidation
  MOD_RES (2)..(2): aminoisobutyric acid
  MISC_FEATURE (12)..(16): Lactam ring between side chains at positions 12 and 16
HXQGTFTSDYSKYLDERRAQDFVQWLMDT

SEQ ID NO: 406 - protein, 29 aa, Artificial Sequence
  Synthetic peptide
  MISC_FEATURE: c-term amidation
  MOD_RES (2)..(2): Aminoisobutyric acid
  MISC_FEATURE (12)..(16): Lactam ring between side chains at positions 12 and 16
HXQGTFTSDYSKYLDERRAKDFVQWLMDT

SEQ ID NO: 407 - protein, 29 aa, Artificial Sequence
  Synthetic peptide
  MISC_FEATURE: c-term amidation
  MOD_RES (2)..(2): Aminoisobutyric acid
  MISC_FEATURE (16)..(20): Lactam ring between side chains at positions 16 and 20
HXQGTFTSDYSKYLDKRRAEDFVQWLMDT

SEQ ID NO: 408 - protein, 29 aa, Artificial Sequence
  Synthetic peptide
  MOD_RES (2)..(2): Aminoisobutyric acid
  MISC_FEATURE (2)..(2): c-term amidation
HXQGTFTSDYSKYLDERAAKDFVQWLMDT

SEQ ID NO: 409 - protein, 29 aa, Artificial Sequence
  Synthetic peptide
  MISC_FEATURE: c-term amidation
  MOD_RES (2)..(2): Aminoisobutyric acid
  MISC_FEATURE (16)..(20): Lactam ring between side chains at positions 16 and 20
HXQGTFTSDYSKYLDERAAKDFVQWLMDT

SEQ ID NO: 410 - protein, 29 aa, Artificial Sequence
  Synthetic peptide
  MISC_FEATURE: c-term amidation
  MOD_RES (2)..(2): Aminoisobutyric acid
  MISC_FEATURE (12)..(16): Lactam ring between side chains at positions 12 and 16
HXQGTFTSDYSKYLDERAAQDFVQWLMDT

SEQ ID NO: 411 - protein, 29 aa, Artificial Sequence
  Synthetic peptide
  MISC_FEATURE: c-term amidation
  MOD_RES (2)..(2): Aminoisobutyric acid
  MISC_FEATURE (12)..(16): Lactam ring between side chains at positions 12 and 16
HXQGTFTSDYSKYLDERAAKDFVQWLMDT

SEQ ID NO: 412 - protein, 29 aa, Artificial Sequence
  Synthetic peptide
  MISC_FEATURE: c-term amidation
  MOD_RES (2)..(2): Aminoisobutyric acid
  MISC_FEATURE (12)..(16): Lactam ring between side chains at positions 16 and 20
HXQGTFTSDYSKYLDKRAAEDFVQWLMDT

SEQ ID NO: 413 - protein, 29 aa, Artificial Sequence
  Synthetic peptide
  MISC_FEATURE: c-term amidation
  MOD_RES (2)..(2): Aminoisobutyric acid
HXQGTFTSDYSKYLDEQAAKEFIAWLMDT

SEQ ID NO: 414 - protein, 29 aa, Artificial Sequence
  Synthetic peptide
  MISC_FEATURE: c-term amidation
  MOD_RES (2)..(2): Aminoisobutyric acid
  MISC_FEATURE (12)..(16): Lactam ring between side chains at positions 12 and 16
HXQGTFTSDYSKYLDEQAAKEFIAWLMDT

SEQ ID NO: 415 - protein, 29 aa, Artificial Sequence
  Synthetic peptide
  MISC_FEATURE: c-term amidation
  MOD_RES (2)..(2): Aminoisobutyric acid
  MISC_FEATURE (16)..(20): Lactam ring between side chains at positions 16 and 20
HXQGTFTSDYSKYLDEQAAKEFIAWLMDT

SEQ ID NO: 416 - protein, 29 aa, Artificial Sequence
  Synthetic peptide
  MISC_FEATURE: c-term amidation
  MOD_RES (2)..(2): D-Ala
HXQGTFTSDYSKYLDERRAQDFVQWLMDT

SEQ ID NO: 417 - protein, 29 aa, Artificial Sequence
  Synthetic peptide
  MISC_FEATURE: c-term amidation
  MOD_RES (2)..(2): D-Ala
HXQGTFTSDYSKYLDERRAKDFVQWLMDT

SEQ ID NO: 418 - protein, 29 aa, Artificial Sequence
  Synthetic peptide
  MISC_FEATURE: c-term amidation
  MOD_RES (2)..(2): D-Ala
  MISC_FEATURE (16)..(20): Lactam ring between side chains at positions 16 and 20
HXQGTFTSDYSKYLDERRAKDFVQWLMDT

SEQ ID NO: 419 - protein, 29 aa, Artificial Sequence
  Synthetic peptide
  MISC_FEATURE: c-term amidation
  MOD_RES (2)..(2): D-Ala
  MISC_FEATURE (12)..(16): Lactam ring between side chains at positions 12 and 16
HXQGTFTSDYSKYLDERRAQDFVQWLMDT

SEQ ID NO: 420 - protein, 29 aa, Artificial Sequence
  Synthetic peptide
  MISC_FEATURE: c-term amidation
  MOD_RES (2)..(2): D-Ala
  MISC_FEATURE (12)..(16): Lactam ring between side chains at positions 12 and 16
HXQGTFTSDYSKYLDERRAKDFVQWLMDT

SEQ ID NO: 421 - protein, 29 aa, Artificial Sequence
  Synthetic peptide
  MISC_FEATURE: c-term amidation
  MOD_RES (2)..(2): D-Ala
  MISC_FEATURE (16)..(20): Lactam ring between side chains at positions 16 and 20
HXQGTFTSDYSKYLDKRRAEDFVQWLMDT

SEQ ID NO: 422 - protein, 29 aa, Artificial Sequence
  Synthetic peptide
  MISC_FEATURE: c-term amidation
  MOD_RES (2)..(2): D-Ala
HXQGTFTSDYSKYLDERAAKDFVQWLMDT

SEQ ID NO: 423 - protein, 29 aa, Artificial Sequence
  Synthetic peptide
  MISC_FEATURE: c-term amidation
  MOD_RES (2)..(2): D-Ala
  MISC_FEATURE (16)..(20): Lactam ring between side chains at positions 16 and 20
HXQGTFTSDYSKYLDERAAKDFVQWLMDT

SEQ ID NO: 424 - protein, 29 aa, Artificial Sequence
  Synthetic peptide
  MISC_FEATURE: c-term amidation
  MOD_RES (2)..(2): D-Ala
  MISC_FEATURE (12)..(16): Lactam ring between side chains at positions 12 and 16
HXQGTFTSDYSKYLDERAAQDFVQWLMDT

SEQ ID NO: 425 - protein, 29 aa, Artificial Sequence
  Synthetic peptide
  MISC_FEATURE: c-term amidation
  MOD_RES (2)..(2): D-Ala
  MISC_FEATURE (12)..(16): Lactam ring between side chains at positions 12 and 16
HXQGTFTSDYSKYLDERAAKDFVQWLMDT

SEQ ID NO: 426 - protein, 29 aa, Artificial Sequence
  Synthetic peptide
  MISC_FEATURE: c-term amidation
  MOD_RES (2)..(2): D-Ala
  MISC_FEATURE (16)..(20): Lactam ring between side chains at positions 16 and 20
HXQGTFTSDYSKYLDKRAAEDFVQWLMDT

SEQ ID NO: 427 - protein, 29 aa, Artificial Sequence
  Synthetic peptide
  MISC_FEATURE: c-term amidation
  MOD_RES (2)..(2): D-Ala
HXQGTFTSDYSKYLDEQAAKEFIAWLMDT

SEQ ID NO: 428 - protein, 29 aa, Artificial Sequence
  Synthetic peptide
  MISC_FEATURE: c-term amidation
  MOD_RES (2)..(2): D-Ala
  MISC_FEATURE (12)..(16): Lactam ring between side chains at positions 12 and 16
HXQGTFTSDYSKYLDEQAAKEFIAWLMDT

SEQ ID NO: 429 - protein, 29 aa, Artificial Sequence
  Synthetic peptide
  MISC_FEATURE: c-term amidation
  MOD_RES (2)..(2): D-Ala
  MISC_FEATURE (16)..(20): Lactam ring between side chains at positions 16 and 20
HXQGTFTSDYSKYLDEQAAKEFIAWLMDT

SEQ ID NO: 430 - protein, 29 aa, Artificial Sequence
  Synthetic peptide
  MISC_FEATURE: c-term amidation
HSEGTFTSDYSKYLDERRAQDFVQWLMDT

SEQ ID NO: 431 - protein, 29 aa, Artificial Sequence
  Synthetic peptide
  MISC_FEATURE: c-term amidation
HSEGTFTSDYSKYLDERRAKDFVQWLMDT

SEQ ID NO: 432 - protein, 29 aa, Artificial Sequence
  Synthetic peptide
  MISC_FEATURE: c-term amidation
  MISC_FEATURE (16)..(20): Lactam ring between side chains at positions 16 and 20
HSEGTFTSDYSKYLDERRAKDFVQWLMDT

SEQ ID NO: 433 - protein, 29 aa, Artificial Sequence
  Synthetic peptide
  MISC_FEATURE: c-term amidation
  MISC_FEATURE (16)..(16): Lactam ring between side chains at positions 12 and 16
HSEGTFTSDYSKYLDERRAQDFVQWLMDT

SEQ ID NO: 434 - protein, 29 aa, Artificial Sequence
  Synthetic peptide
  MISC_FEATURE: c-term amidation
  MISC_FEATURE (12)..(16): Lactam ring between side chains at positions 12 and 16
HSEGTFTSDYSKYLDERRAKDFVQWLMDT

SEQ ID NO: 435 - protein, 29 aa, Artificial Sequence
  Synthetic peptide
  MISC_FEATURE: c-term amidation
  MISC_FEATURE (16)..(20): Lactam ring between side chains at positions 16 and 20
HSEGTFTSDYSKYLDKRRAEDFVQWLMDT

SEQ ID NO: 436 - protein, 29 aa, Artificial Sequence
  Synthetic peptide
  MISC_FEATURE: c-term amidation
HSEGTFTSDYSKYLDERAAKDFVQWLMDT

SEQ ID NO: 437 - protein, 29 aa, Artificial Sequence
  Synthetic peptide
  MISC_FEATURE: c-term amidation
  MISC_FEATURE: Lactam ring between side chains at positions 16 and 20
HSEGTFTSDYSKYLDERAAKDFVQWLMDT

SEQ ID NO: 438 - protein, 29 aa, Artificial Sequence
  Synthetic peptide
  MISC_FEATURE: c-term amidation
  MISC_FEATURE (12)..(16): Lactam ring between side chains at positions 12 and 16
HSEGTFTSDYSKYLDERAAQDFVQWLMDT

SEQ ID NO: 439 - protein, 29 aa, Artificial Sequence
  Synthetic peptide
  MISC_FEATURE: c-term amidation
  MISC_FEATURE (12)..(16): Lactam ring between side chains at positions 12 and 16
HSEGTFTSDYSKYLDERAAKDFVQWLMDT

SEQ ID NO: 440 - protein, 29 aa, Artificial Sequence
  Synthetic peptide
  MISC_FEATURE: c-term amidation
  MISC_FEATURE (16)..(20): Lactam ring between side chains at positions 16 and 20
HSEGTFTSDYSKYLDKRAAEDFVQWLMDT

SEQ ID NO: 441 - protein, 29 aa, Artificial Sequence
  Synthetic peptide
  MISC_FEATURE: c-term amidation
HSEGTFTSDYSKYLDEQAAKEFIAWLMDT

SEQ ID NO: 442 - protein, 29 aa, Artificial Sequence
  Synthetic peptide
  MISC_FEATURE: c-term amidation
  MISC_FEATURE (12)..(16): Lactam ring between side chains at positions 12 and 16
HSEGTFTSDYSKYLDEQAAKEFIAWLMDT

SEQ ID NO: 443 - protein, 29 aa, Artificial Sequence
  Synthetic peptide
  MISC_FEATURE: c-term amidation
  MISC_FEATURE (16)..(20): Lactam ring between side chains at positions 16 and 20
HSEGTFTSDYSKYLDEQAAKEFIAWLMDT

SEQ ID NO: 444 - protein, 29 aa, Artificial Sequence
  Synthetic peptide
  MISC_FEATURE: c-term amidation
  MOD_RES (1)..(1): (Des-amino)His
XSEGTFTSDYSKYLDERRAQDFVQWLMDT

SEQ ID NO: 445 - protein, 29 aa, Artificial Sequence
  Synthetic peptide
  MISC_FEATURE: c-term amidation
  MOD_RES (1)..(1): (Des-amino)His
XSEGTFTSDYSKYLDERRAKDFVQWLMDT

SEQ ID NO: 446 - protein, 29 aa, Artificial Sequence
  Synthetic peptide
  MISC_FEATURE: c-term amidation
  MOD_RES (1)..(1): (Des-amino)His
  MISC_FEATURE (16)..(20): Lactam ring between side chains at positions 16 and 20
XSEGTFTSDYSKYLDERRAKDFVQWLMDT

SEQ ID NO: 447 - protein, 29 aa, Artificial Sequence
  Synthetic peptide
  MISC_FEATURE: c-term amidation
  MISC_FEATURE: Lactam ring between side chains at positions 12 and 16
  MOD_RES (1)..(1): (Des-amino)His
XSEGTFTSDYSKYLDERRAQDFVQWLMDT

SEQ ID NO: 448 - protein, 29 aa, Artificial Sequence
  Synthetic peptide
  MISC_FEATURE: c-term amidation
  MOD_RES (1)..(1): (Des-amino)His
  MISC_FEATURE (12)..(16): Lactam ring between side chains at positions 12 and 16
XSEGTFTSDYSKYLDERRAKDFVQWLMDT

SEQ ID NO: 449 - protein, 29 aa, Artificial Sequence
  Synthetic peptide
  MISC_FEATURE: c-term amidation
  MOD_RES (1)..(1): (Des-amino)His
  MISC_FEATURE (16)..(20): Lactam ring between side chains at positions 16 and 20
XSEGTFTSDYSKYLDKRRAEDFVQWLMDT

SEQ ID NO: 450 - protein, 29 aa, Artificial Sequence
  Synthetic peptide
  MISC_FEATURE: c-term amidation
  MOD_RES (1)..(1): (Des-amino)His
XSEGTFTSDYSKYLDERAAKDFVQWLMDT

SEQ ID NO: 451 - protein, 29 aa, Artificial Sequence
  Synthetic peptide
  MISC_FEATURE: c-term amidation
  MOD_RES (1)..(1): (Des-amino)His
  MISC_FEATURE (16)..(20): Lactam ring between side chains at positions 16 and 20
XSEGTFTSDYSKYLDERAAKDFVQWLMDT

SEQ ID NO: 452 - protein, 29 aa, Artificial Sequence
  Synthetic peptide
  MISC_FEATURE: C-term amidation
  MOD_RES (1)..(1): (Des-amino)His
  MISC_FEATURE (12)..(16): Lactam ring between side chains at positions 12 and 16
XSEGTFTSDYSKYLDERAAQDFVQWLMDT

SEQ ID NO: 453 - protein, 29 aa, Artificial Sequence
  Synthetic peptide
  MISC_FEATURE: c-term amidation
  MOD_RES (1)..(1): (Des-amino)His
  MISC_FEATURE (12)..(16): Lactam ring between side chains at positions 12 and 16
XSEGTFTSDYSKYLDERAAKDFVQWLMDT

SEQ ID NO: 454 - protein, 29 aa, Artificial Sequence
  Synthetic peptide
  MISC_FEATURE: c-term amidation
  MOD_RES (1)..(1): (Des-amino)His
  MISC_FEATURE (16)..(20): Lactam ring between side chains at positions 16 and 20
XSEGTFTSDYSKYLDKRAAEDFVQWLMDT

SEQ ID NO: 455 - protein, 29 aa, Artificial Sequence
  Synthetic peptide
  MISC_FEATURE: c-term amidation
  MOD_RES (1)..(1): (Des-amino)His
XSEGTFTSDYSKYLDEQAAKEFIAWLMDT

SEQ ID NO: 456 - protein, 29 aa, Artificial Sequence
  Synthetic peptide
  MISC_FEATURE: c-term amidation
  MOD_RES (1)..(1): (Des-amino)His
  MISC_FEATURE (12)..(16): Lactam ring between side chains at positions 12 and 16
XSEGTFTSDYSKYLDEQAAKEFIAWLMDT

SEQ ID NO: 457 - protein, 29 aa, Artificial Sequence
  Synthetic peptide
  MISC_FEATURE: c-term amidation
  MOD_RES (1)..(1): (Des-amino)His
  MISC_FEATURE (16)..(20): Lactam ring between side chains at positions 16 and 20
XSEGTFTSDYSKYLDEQAAKEFIAWLMDT

SEQ ID NO: 458 - protein, 29 aa, Artificial Sequence
  Synthetic peptide
  MISC_FEATURE: c-term amidation
  MOD_RES (2)..(2): Aminoisobutyric acid
HXEGTFTSDYSKYLDERRAQDFVQWLMDT

SEQ ID NO: 459 - protein, 29 aa, Artificial Sequence
  Synthetic peptide
  MISC_FEATURE: c-term amidation
  MOD_RES (2)..(2): Aminoisobutyric acid
HXEGTFTSDYSKYLDERRAKDFVQWLMDT

SEQ ID NO: 460 - protein, 29 aa, Artificial Sequence
  Synthetic peptide
  MISC_FEATURE: c-term amidation
  MOD_RES (2)..(2): Aminoisobutyric acid
  MISC_FEATURE (16)..(20): Lactam ring between side chains at positions 16 and 20
HXEGTFTSDYSKYLDERRAKDFVQWLMDT

SEQ ID NO: 461 - protein, 29 aa, Artificial Sequence
  Synthetic peptide
  MISC_FEATURE: c-term amidation
  MOD_RES (2)..(2): Aminoisobutyric acid
  MISC_FEATURE (12)..(16): Lactam ring between side chains at positions 12 and 16
HXEGTFTSDYSKYLDERRAQDFVQWLMDT

SEQ ID NO: 462 - protein, 29 aa, Artificial Sequence
  Synthetic peptide
  MISC_FEATURE: c-term amidation
  MOD_RES (2)..(2): Aminoisobutyric acid
  MISC_FEATURE (12)..(16): Lactam ring between side chains at positions 12 and 16
HXEGTFTSDYSKYLDERRAKDFVQWLMDT

SEQ ID NO: 463 - protein, 29 aa, Artificial Sequence
  Synthetic peptide
  MISC_FEATURE: c-term amidation
  MOD_RES (2)..(2): Aminoisobutyric acid
  MISC_FEATURE (16)..(20): Lactam ring between side chains at positions 16 and 20
HXEGTFTSDYSKYLDKRRAEDFVQWLMDT

SEQ ID NO: 464 - protein, 29 aa, Artificial Sequence
  Synthetic peptide
  MISC_FEATURE: c-term amidation
  MOD_RES (2)..(2): Aminoisobutyric acid
HXEGTFTSDYSKYLDERAAKDFVQWLMDT

SEQ ID NO: 465 - protein, 29 aa, Artificial Sequence
  Synthetic peptide
  MISC_FEATURE: c-term amidation
  MOD_RES (2)..(2): Aminoisobutyric acid
  MISC_FEATURE (16)..(20): Lactam ring between side chains at positions 16 and 20
HXEGTFTSDYSKYLDERAAKDFVQWLMDT

SEQ ID NO: 466 - protein, 29 aa, Artificial Sequence
  Synthetic peptide
  MISC_FEATURE: c-term amidation
  MOD_RES (2)..(2): Aminoisobutyric acid
  MISC_FEATURE (12)..(16): Lactam ring between side chains at postions 12 and 16
HXEGTFTSDYSKYLDERAAQDFVQWLMDT

SEQ ID NO: 467 - protein, 29 aa, Artificial Sequence
  Synthetic peptide
  MISC_FEATURE: c-term amidation
  MOD_RES (2)..(2): Aminoisobutyric acid
  MISC_FEATURE (12)..(16): Lactam ring between side chains at positions 12 and 16
HXEGTFTSDYSKYLDERAAKDFVQWLMDT

SEQ ID NO: 468 - protein, 29 aa, Artificial Sequence
  Synthetic peptide
  MISC_FEATURE: c-term amidation
  MOD_RES (2)..(2): Aminoisobutyric acid
  MISC_FEATURE (12)..(16): Lactam ring between side chains at positions 16 and 20
HXEGTFTSDYSKYLDKRAAEDFVQWLMDT

SEQ ID NO: 469 - protein, 29 aa, Artificial Sequence
  Synthetic peptide
  MISC_FEATURE: c-term amidation
  MOD_RES (2)..(2): Aminoisobutyric acid
HXEGTFTSDYSKYLDEQAAKEFIAWLMDT

SEQ ID NO: 470 - protein, 29 aa, Artificial Sequence
  Synthetic peptide
  MISC_FEATURE: c-term amidation
  MOD_RES (2)..(2): Aminoisobutyric acid
  MISC_FEATURE (12)..(16): Lactam ring between side chains at positions 12 and 16
HXEGTFTSDYSKYLDEQAAKEFIAWLMDT

SEQ ID NO: 471 - protein, 29 aa, Artificial Sequence
  Synthetic peptide
  MISC_FEATURE: c-term amidation
  MOD_RES (2)..(2): Aminoisobutyric acid
  MISC_FEATURE (16)..(20): Lactam ring between side chains at positions 16 and 20
HXEGTFTSDYSKYLDEQAAKEFIAWLMDT

SEQ ID NO: 472 - protein, 29 aa, Artificial Sequence
  Synthetic peptide
  MISC_FEATURE: c-term amidation
  MOD_RES (2)..(2): D-Ala
HXEGTFTSDYSKYLDERRAQDFVQWLMDT

SEQ ID NO: 473 - protein, 29 aa, Artificial Sequence
  Synthetic peptide
  MISC_FEATURE: c-term amidation
  MOD_RES (2)..(2): D-Ala
HXEGTFTSDYSKYLDERRAKDFVQWLMDT

SEQ ID NO: 474 - protein, 29 aa, Artificial Sequence
  Synthetic peptide
  MISC_FEATURE: c-term amidation
  MOD_RES (2)..(2): D-Ala
  MISC_FEATURE (16)..(20): Lactam ring between side chains at positions 16 and 20
HXEGTFTSDYSKYLDERRAKDFVQWLMDT

SEQ ID NO: 475 - protein, 29 aa, Artificial Sequence
  Synthetic peptide
  MISC_FEATURE: c-term amidation
  MOD_RES (2)..(2): D-Ala
  MISC_FEATURE (12)..(16): Lactam ring between side chains at positions 12 and 16
HXEGTFTSDYSKYLDERRAQDFVQWLMDT

SEQ ID NO: 476 - protein, 29 aa, Artificial Sequence
  Synthetic peptide
  MISC_FEATURE: c-term amidation
  MOD_RES (2)..(2): D-Ala
  MISC_FEATURE (12)..(16): Lactam ring between side chains at positions 12 and 16
HXEGTFTSDYSKYLDERRAKDFVQWLMDT

SEQ ID NO: 477 - protein, 29 aa, Artificial Sequence
  Synthetic peptide
  MISC_FEATURE: c-term amidation
  MOD_RES (2)..(2): D-Ala
  MISC_FEATURE (16)..(20): Lactam ring between side chains at positions 16 and 20
HXEGTFTSDYSKYLDKRRAEDFVQWLMDT

SEQ ID NO: 478 - protein, 29 aa, Artificial Sequence
  Synthetic peptide
  MISC_FEATURE: c-term amidation
  MOD_RES (2)..(2): D-Ala
HXEGTFTSDYSKYLDERAAKDFVQWLMDT

SEQ ID NO: 479 - protein, 29 aa, Artificial Sequence
  Synthetic peptide
  MISC_FEATURE: c-term amidation
  MOD_RES (2)..(2): D-Ala
  MISC_FEATURE (16)..(20): Lactam ring between side chains at positions 16 and 20
HXEGTFTSDYSKYLDERAAKDFVQWLMDT

SEQ ID NO: 480 - protein, 29 aa, Artificial Sequence
  Synthetic peptide
  MISC_FEATURE: c-term amidation
  MOD_RES (2)..(2): D-Ala
  MISC_FEATURE (12)..(16): Lactam ring between side chains at positions 12 and 16
HXEGTFTSDYSKYLDERAAQDFVQWLMDT

SEQ ID NO: 481 - protein, 29 aa, Artificial Sequence
  Synthetic peptide
  MISC_FEATURE: c-term amidation
  MOD_RES (2)..(2): D-Ala
  MISC_FEATURE (12)..(16): Lactam ring between side chains at positions 12 and 16
HXEGTFTSDYSKYLDERAAKDFVQWLMDT

SEQ ID NO: 482 - protein, 29 aa, Artificial Sequence
  Synthetic peptide
  MISC_FEATURE: c-term amidation
  MOD_RES (2)..(2): D-Ala
  MISC_FEATURE (16)..(20): Lactam ring between side chains at positions 16 and 20
HXEGTFTSDYSKYLDKRAAEDFVQWLMDT

SEQ ID NO: 483 - protein, 29 aa, Artificial Sequence
  Synthetic peptide
  MISC_FEATURE: c-term amidation
  MOD_RES (2)..(2): D-Ala
HXEGTFTSDYSKYLDEQAAKEFIAWLMDT

SEQ ID NO: 484 - protein, 29 aa, Artificial Sequence
  Synthetic peptide
  MISC_FEATURE: c-term amidation
  MOD_RES (2)..(2): D-Ala
  MISC_FEATURE (12)..(16): Lactam ring between side chains at positions 12 and 16
HXEGTFTSDYSKYLDEQAAKEFIAWLMDT

SEQ ID NO: 485 - protein, 29 aa, Artificial Sequence
  Synthetic peptide
  MISC_FEATURE: c-term amidation
  MOD_RES (2)..(2): D-Ala
  MISC_FEATURE (16)..(20): Lactam ring between side chains at positions 16 and 20
HXEGTFTSDYSKYLDEQAAKEFIAWLMDT

SEQ ID NO: 486 - protein, 29 aa, Artificial Sequence
  Synthetic peptide
  MISC_FEATURE: c-term amidation
  MOD_RES (2)..(2): Aminoisobutyric acid
  MOD_RES (24)..(24): Cys-PEG
HXQGTFTSDYSKYLDEQAAKEFICWLMNT

SEQ ID NO: 487 - protein, 29 aa, Artificial Sequence
  Synthetic peptide
  MISC_FEATURE: c-term amidation
  MOD_RES (2)..(2): Aminoisobutyric acid
  MOD_RES (29)..(29): Cys-PEG
HXQGTFTSDYSKYLDEQAAKEFIAWLMNC

SEQ ID NO: 488 - protein, 40 aa, Artificial Sequence
  Synthetic peptide
  MISC_FEATURE: c-term amidation
  MOD_RES (2)..(2): Aminoisobutyric acid
  MOD_RES (40)..(40): Cys-PEG
HXQGTFTSDYSKYLDEQAAKEFIAWLMNGGPSSGAPPPSC

SEQ ID NO: 489 - protein, 40 aa, Artificial Sequence; identical to SEQ ID NO: 488
  Synthetic peptide
  MISC_FEATURE: c-term amidation
  MOD_RES (2)..(2): Aminoisobutyric acid
  MISC_FEATURE (16)..(20): Lactam ring between side chains at positions 16 and 20
  MOD_RES (40)..(40): Cys-PEG

SEQ ID NO: 490 - protein, 39 aa, Artificial Sequence
  Synthetic peptide
  MISC_FEATURE: c-term amidation
  MOD_RES (2)..(2): Aminoisobutyric acid
  MOD_RES (24)..(24): Cys-PEG
HXQGTFTSDYSKYLDEQAAKEFICWLMNGGPSSGAPPPS

SEQ ID NO: 491 - protein, 39 aa, Artificial Sequence; identical to SEQ ID NO: 490
  Synthetic peptide
  MISC_FEATURE: c-term amidation
  MOD_RES (2)..(2): Aminoisobutyric acid
  MISC_FEATURE (16)..(20): Lactam ring between side chains at positions 16 and 20
  MOD_RES (24)..(24): Cys-PEG

SEQ ID NO: 492 - protein, 29 aa, Artificial Sequence
  Synthetic peptide
  MISC_FEATURE: c-term amidation
  MOD_RES (2)..(2): Aminoisobutyric acid
  MOD_RES (24)..(24): Cys-PEG
HXQGTFTSDYSKYLDERAAKDFVCWLMNT

SEQ ID NO: 493 - protein, 29 aa, Artificial Sequence
  Synthetic peptide
  MISC_FEATURE: c-term amidation
  MOD_RES (2)..(2): Aminoisobutyric acid
  MOD_RES (24)..(24): Cys-PEG
HXQGTFTSDYSKYLDERAAKDFVQWLMNC

SEQ ID NO: 494 - protein, 40 aa, Artificial Sequence
  Synthetic peptide
  MISC_FEATURE: c-term amidation
  MOD_RES (2)..(2): Aminoisobutyric acid
  MOD_RES (24)..(24): Cys-PEG
HXQGTFTSDYSKYLDERAAKDFVQWLMNGGPSSGAPPPSC

SEQ ID NO: 495 - protein, 40 aa, Artificial Sequence; identical to SEQ ID NO: 494
  Synthetic peptide
  MISC_FEATURE: c-term amidation
  MOD_RES (2)..(2): Aminoisobutyric acid
  MISC_FEATURE (16)..(20): Lactam ring between side chains at positions 16 and 20
  MOD_RES (40)..(40): Cys-PEG

SEQ ID NO: 496 - protein, 39 aa, Artificial Sequence
  Synthetic peptide
  MISC_FEATURE: c-term amidation
  MOD_RES (2)..(2): Aminoisobutyric acid
  MOD_RES (24)..(24): Cys-PEG
HXQGTFTSDYSKYLDERAAKDFVCWLMNGGPSSGAPPPS

SEQ ID NO: 497 - protein, 39 aa, Artificial Sequence; identical to SEQ ID NO: 496
  Synthetic peptide
  MISC_FEATURE: c-term amidation
  MOD_RES (2)..(2): Aminoisobutyric acid
  MISC_FEATURE (16)..(20): Lactam ring between side chains at positions 16 and 20
  MOD_RES (24)..(24): Cys-PEG

SEQ ID NO: 498 - protein, 30 aa, Artificial Sequence
  Synthetic peptide
  MISC_FEATURE: c-term amidation
  MOD_RES (2)..(2): Aminoisobutyric acid
  MOD_RES (24)..(24): Cys-PEG
HXQGTFTSDYSKYLDERRAKDFVCWLMNTA

SEQ ID NO: 499 - protein, 29 aa, Artificial Sequence
  Synthetic peptide
  MISC_FEATURE: c-term amidation
  MOD_RES (2)..(2): Aminoisobutyric acid
  MOD_RES (24)..(24): Cys-PEG
HXQGTFTSDYSKYLDERRAKDFVQWLMNC

SEQ ID NO: 500 - protein, 40 aa, Artificial Sequence
  Synthetic peptide
  MISC_FEATURE: c-term amidation
  MOD_RES (2)..(2): Aminoisobutyric acid
  MOD_RES (40)..(40): Cys-PEG
HXQGTFTSDYSKYLDERRAKDFVQWLMNGGPSSGAPPPSC

SEQ ID NO: 501 - protein, 40 aa, Artificial Sequence; identical to SEQ ID NO: 500
  Synthetic peptide
  MISC_FEATURE: c-term amidation
  MOD_RES (2)..(2): Aminoisobutyric acid
  MISC_FEATURE (16)..(20): Lactam ring between side chains at positions 16 and 20
  MOD_RES (40)..(40): Cys-PEG

SEQ ID NO: 502 - protein, 39 aa, Artificial Sequence
  Synthetic peptide
  MISC_FEATURE: c-term amidation
  MOD_RES (2)..(2): Aminoisobutyric acid
  MOD_RES (24)..(24): Cys-PEG
HXQGTFTSDYSKYLDERRAKDFVCWLMNGGPSSGAPPPS

SEQ ID NO: 503 - protein, 39 aa, Artificial Sequence; identical to SEQ ID NO: 502
  Synthetic peptide
  MISC_FEATURE: c-term amidation
  MOD_RES (2)..(2): Aminoisobutyric acid
  MISC_FEATURE (16)..(20): Lactam ring between side chains at positions 16 and 20
  MOD_RES (24)..(24): Cys-PEG

SEQ ID NO: 504 - protein, 29 aa, Artificial Sequence
  Synthetic peptide
  MISC_FEATURE: c-term amidation
  MOD_RES (2)..(2): Aminoisobutyric acid
  MISC_FEATURE (16)..(20): Lactam ring between side chains at positions 16 and 20
  MOD_RES (24)..(24): Cys-PEG
HXQGTFTSDYSKYLDEQAAKEFICWLMNT

SEQ ID NO: 505 - protein, 29 aa, Artificial Sequence
  Synthetic peptide
  MISC_FEATURE: c-term amidation
  MOD_RES (1)..(1): Alpha, Alpha-Dimethyl Imidiazole Acetic Acid
  MISC_FEATURE (16)..(20): Lactam ring between side chains at positions 16 and 20
  MOD_RES (24)..(24): Cys-PEG
XSQGTFTSDYSKYLDEQAAKEFICWLMNT

SEQ ID NO: 506 - protein, 29 aa, Artificial Sequence
  Synthetic peptide
  MISC_FEATURE: c-term amidation
  MOD_RES (1)..(1): Alpha, Alpha-Dimethly Imidiazole Acetic Acid
  MISC_FEATURE (16)..(20): Lactam ring between side chains at positions 16 and 20
  MOD_RES (29)..(29): Cys-PEG
XSQGTFTSDYSKYLDEQAAKEFIAWLMNC

SEQ ID NO: 507 - protein, 40 aa, Artificial Sequence
  Synthetic peptide
  MISC_FEATURE: c-term amidation
  MOD_RES (1)..(1): Alpha, Alpha Dimethyl Imidiazole Acetic Acid
  MISC_FEATURE (16)..(20): Lactam ring between side chains at positions 16 and 20
  MOD_RES (40)..(40): Cys-PEG
XSQGTFTSDYSKYLDEQAAKEFIAWLMNGGPSSGAPPPSC

SEQ ID NO: 508 - protein, 40 aa, Artificial Sequence
  Synthetic peptide
  MISC_FEATURE: c-term amidation
  MOD_RES (1)..(1): Alpha, Alpha Dimethyl Imidiazole Acetic Acid
  MISC_FEATURE (16)..(20): Lactam ring between side chains at positions 16 and 20
  MOD_RES (40)..(40): Cys-PEG
XSQGTFTSDYSKYLDERRAKDFVQWLMNGGPSSGAPPPSC

SEQ ID NO: 509 - protein, 39 aa, Artificial Sequence
  Synthetic peptide
  MISC_FEATURE: c-term amidation
  MOD_RES (1)..(1): Alpha, Alpha Dimethyl Imidiazole Acetic Acid
  MISC_FEATURE (16)..(20): Lactam ring between side chains at positions 16 and 20
  MOD_RES (24)..(24): Cys-PEG
XSQGTFTSDYSKYLDEQAAKEFICWLMNGGPSSGAPPPS

SEQ ID NO: 510 - protein, 29 aa, Artificial Sequence
  Synthetic peptide
  MISC_FEATURE: c-term amidation
  MOD_RES (1)..(1): Alpha, Alpha Dimethyl Imidiazole Acetic Acid
  misc_feature (2)..(2): Xaa can be any naturally occurring amino acid
  MISC_FEATURE (16)..(20): Lactam ring between side chains at positions 16 and 20
  MOD_RES (24)..(24): Cys-PEG
HXQGTFTSDYSKYLDERRAKDFVCWLMNT

SEQ ID NO: 511 - protein, 29 aa, Artificial Sequence
  Synthetic peptide
  MISC_FEATURE: c-term amidation
  MOD_RES (2)..(2): Alpha, Alpha Dimethyl Imidiazole Acetic Acid
  MISC_FEATURE (16)..(20): Lactam ring between side chains at positions 16 and 20
  MOD_RES (24)..(24): Cys-PEG
HXQGTFTSDYSKYLDERRAKDFVCWLMNT

SEQ ID NO: 512 - protein, 29 aa, Artificial Sequence
  Synthetic peptide
  MISC_FEATURE: c-term amidation
  MOD_RES (1)..(1): Alpha, Alpha Dimethyl Imidiazole Acetic Acid
  MISC_FEATURE (16)..(20): Lactam ring between side chains at positions 16 and 20
  MOD_RES (29)..(29): Cys-PEG
XSQGTFTSDYSKYLDERRAKDFVQWLMNC

SEQ ID NO: 513 - protein, 39 aa, Artificial Sequence
  Synthetic peptide
  MISC_FEATURE: c-term amidation
  MOD_RES (1)..(1): Alpha, Alpha Dimethyl Imidiazole Acetic Acid
  MISC_FEATURE (16)..(20): Lactam ring between side chains at positions 16 and 20
  MOD_RES (24)..(24): Cys-PEG
XSQGTFTSDYSKYLDERRAKDFVCWLMNGGPSSGAPPPS

SEQ ID NO: 514 - protein, 29 aa, Artificial Sequence
  Synthetic peptide
  MISC_FEATURE: c-term amidation
  MISC_FEATURE (16)..(20): Lactam ring between side chains at positions 16 and 20
  MOD_RES (24)..(24): Cys-PEG
HSQGTFTSDYSKYLDEQAAKEFICWLMNT

SEQ ID NO: 515 - protein, 11 aa, Artificial Sequence
  Synthetic peptide
GGPSSGAPPPS

SEQ ID NO: 516 - protein, 12 aa, Artificial Sequence
  Synthetic peptide
  MOD_RES (12)..(12): Cys-PEG
GGPSSGAPPPSC

SEQ ID NO: 517 - protein, 29 aa, Artificial Sequence
  Synthetic peptide
  MISC_FEATURE: c-term amidation
  MOD_RES (2)..(2): Aminoisobutyric acid
  MISC_FEATURE (16)..(20): Lactam ring between side chains at positions 16 and 20
  MOD_RES (24)..(24): Cys-PEG
HXQGTFTSDYSKYLDERRAKDFVCWLMNT

SEQ ID NO: 518 - protein, 29 aa, Artificial Sequence
  Synthetic peptide
  MISC_FEATURE: c-term amidation
  MOD_RES (24)..(24): Cys-PEG
HSQGTFTSDYSKYLDEQAAKEFICWLMNT

SEQ ID NO: 519 - protein, 29 aa, Artificial Sequence
  Synthetic peptide
  MISC_FEATURE: c-term amidation
  MOD_RES (1)..(1): Alpha, Alpha Dimethly Imidiazole Acetic Acid
  MOD_RES (24)..(24): Cys-PEG
XSQGTFTSDYSKYLDEQAAKEFICWLMNT

SEQ ID NO: 520 - protein, 29 aa, Artificial Sequence
  Synthetic peptide
  MISC_FEATURE: c-term amidation
  MOD_RES (1)..(1): Alpha, Alpha Dimethyl Imidiazole Acetic Acid
  MOD_RES (29)..(29): Cys-PEG
XSQGTFTSDYSKYLDEQAAKEFIAWLMNC

SEQ ID NO: 521 - protein, 39 aa, Artificial Sequence; identical to SEQ ID NO: 36
  Synthetic peptide
  MISC_FEATURE: c-term amidation

SEQ ID NO: 522 - protein, 39 aa, Artificial Sequence
  Synthetic peptide
  MISC_FEATURE: c-term amidation
HSQGTFTSDYSKYLDSRRAQDFVQWLMNGGPSSGAPPPS

SEQ ID NO: 523 - protein, 39 aa, Artificial Sequence
  Synthetic peptide
  MISC_FEATURE: c-term amidation
HSQGTFTSDYSKYLDSRRAQDFVQWLMKGGPSSGAPPPS

SEQ ID NO: 524 - protein, 39 aa, Artificial Sequence
  Synthetic peptide
  MISC_FEATURE: c-term amidation
HSQGTFTSDYSKYLDSRRAQDFVQWLVKGGPSSGAPPPS

SEQ ID NO: 525 - protein, 39 aa, Artificial Sequence
  Synthetic peptide
  MISC_FEATURE: c-term amidation
HSQGTFTSDYSKYLDSRRAQDFVQWLMDGGPSSGAPPPS

SEQ ID NO: 526 - protein, 39 aa, Artificial Sequence
  Synthetic peptide
  MISC_FEATURE: c-term amidation
HSQGTFTSDYSKYLDERRAKDFVQWLMDGGPSSGAPPPS

SEQ ID NO: 527 - protein, 30 aa, Artificial Sequence
  Synthetic peptide
  MISC_FEATURE: c-term amidation
HAEGTFTSDVSSYLEGQAAKEFIAWLVKGG

SEQ ID NO: 528 - protein, 29 aa, Artificial Sequence
  Synthetic peptide
  MISC_FEATURE: c-term amidation
  MOD_RES (2)..(2): Aminoisobutyric acid
  MISC_FEATURE (16)..(20): Lactam ring between side chains at positions 16 and 20
  MOD_RES (24)..(24): Cys-PEG
HXQGTFTSDYSKYLDERRAKDFVCWLMNT

SEQ ID NO: 529 - protein, 39 aa, Artificial Sequence; identical to SEQ ID NO: 513
  Synthetic peptide
  MISC_FEATURE: c-term amidation
  MOD_RES (1)..(1): Alpha, Alpha Dimethyl Imidiazole Acetic Acid
  MOD_RES (24)..(24): Cys-PEG

SEQ ID NO: 530 - protein, 29 aa, Artificial Sequence
  Synthetic peptide
  MISC_FEATURE: c-term amidation
  MOD_RES (1)..(1): Alpha, Alpha Dimethyl Imidiazole Acetic Acid
  MOD_RES (24)..(24): Cys-PEG
XSQGTFTSDYSKYLDERRAKDFVCWLMNT

SEQ ID NO: 531 - protein, 40 aa, Artificial Sequence
  Synthetic peptide
  MISC_FEATURE: c-term amidation
  MOD_RES (2)..(2): Aminoisobutyric acid
  MOD_RES (24)..(24): Cys-PEG
  MOD_RES (40)..(40): Cys-PEG
HXQGTFTSDYSKYLDERRAKEFICWLMNGGPSSGAPPPSC

SEQ ID NO: 532 - protein, 41 aa, Artificial Sequence
  Synthetic peptide
  MISC_FEATURE: c-term amidation
  MOD_RES (2)..(2): Aminoisobutyric acid
  MOD_RES (40)..(40): Cys-PEG
  MOD_RES (41)..(41): Cys-PEG
HXQGTFTSDYSKYLDEQAAKEFIAWLMNGGPSSGAPPPSCC

SEQ ID NO: 533 - protein, 39 aa, Artificial Sequence; identical to SEQ ID NO: 490
  Synthetic peptide
  MOD_RES (2)..(2): Aminoisobutyric acid
  MOD_RES (24)..(24): Cys-PEG
  MISC_FEATURE (24)..(24): c-term amidation

SEQ ID NO: 534 - protein, 29 aa, Artificial Sequence
  Synthetic peptide
  MISC_FEATURE: Chimera 2 AIB2 K10-C8 Cys 24-40K
  MISC_FEATURE: c-term amidation
  MOD_RES (2)..(2): Aminoisobutyric acid
  MOD_RES (10)..(10): Acylated with C8 fatty acid
  MOD_RES (24)..(24): Cys-PEG
HXQGTFTSDKSKYLDEQAAKEFICWLMNT

SEQ ID NO: 535 - protein, 29 aa, Artificial Sequence
  Synthetic peptide
  MISC_FEATURE: Chimera 2 AIB2 K10-C14 Cys 24-40K
  MISC_FEATURE: c-term amidation
  MOD_RES (2)..(2): Aminoisobutyric acid
  MOD_RES (10)..(10): Acylated with C14 fatty acid
  MOD_RES (24)..(24): Cys-PEG
HXQGTFTSDKSKYLDEQAAKEFICWLMNT

SEQ ID NO: 536 - protein, 29 aa, Artificial Sequence
  Synthetic peptide
  MISC_FEATURE: Chimera 2 AIB2 K10-C16 Cys24-40K
  MISC_FEATURE: c-term amidation
  MOD_RES (2)..(2): Aminoisobutyric acid
  MOD_RES (10)..(10): Acylated with C16 fatty acid
  MOD_RES (24)..(24): Cys-PEG
HXQGTFTSDKSKYLDEQAAKEFICWLMNT

SEQ ID NO: 537 - protein, 29 aa, Artificial Sequence
  Synthetic peptide
  MISC_FEATURE: Chimera 2 AIB2 K10-C18 Cys24-40K
  MISC_FEATURE: c-term amidation
  MOD_RES (2)..(2): Aminoisobutyric acid
  MOD_RES (10)..(10): Acylated with C18 fatty acid
  MOD_RES (24)..(24): Cys-PEG
HXQGTFTSDKSKYLDEQAAKEFICWLMNT

SEQ ID NO: 538 - protein, 29 aa, Artificial Sequence
  Synthetic peptide
  MISC_FEATURE: Chimera 2 K10-C18 Cys24-40K
  MISC_FEATURE: c-term amidation
  MOD_RES (10)..(10): Acylated with C18 fatty acid
  MOD_RES (24)..(24): Cys-PEG
HSQGTFTSDKSKYLDEQAAKEFICWLMNT

SEQ ID NO: 539 - protein, 29 aa, Artificial Sequence
  Synthetic peptide
  MISC_FEATURE: Glucagon E16 K20 K10-C18 Cys24-40K
  MOD_RES (10)..(10): Acylated with C18 fatty acid
  MOD_RES (24)..(24): Cys-PEG
HSQGTFTSDKSKYLDERRAKDFVCWLMNT

SEQ ID NO: 540 - protein, 29 aa, Artificial Sequence
  Synthetic peptide
  MISC_FEATURE: Glucagon E16 K20 K10-W-C18
  MISC_FEATURE: c-term amidation
  MOD_RES (10)..(10): Covalently bound to Trp residue comprising a C18 fatty acid
HSQGTFTSDKSKYLDERRAKDFVQWLMNT

SEQ ID NO: 541 - protein, 29 aa, Artificial Sequence
  Synthetic peptide
  MISC_FEATURE: Glucagon E16 K20 K10-W-C16 Cys24-40K
  MOD_RES (10)..(10): Covalently bound to Trp residue comprising a C16 fatty acid
  MOD_RES (24)..(24): Cys-PEG
HSQGTFTSDKSKYLDERRAKDFVCWLMNT

SEQ ID NO: 542 - protein, 29 aa, Artificial Sequence
  Synthetic peptide
  MISC_FEATURE: Glucagon E16 K20 K10-C16
  MISC_FEATURE: c-term amidation
  MOD_RES (10)..(10): Covalently bound to C16 fatty acid
HSQGTFTSDKSKYLDERRAKDFVQWLMNT

SEQ ID NO: 543 - protein, 29 aa, Artificial Sequence
  Synthetic peptide
  MISC_FEATURE: Glucagon E16 K20 K10-C16
  MISC_FEATURE: c-term amidation
  MOD_RES (10)..(10): Covalently bound to Trp residue comprising a C16 fatty acid
HSQGTFTSDKSKYLDERRAKDFVQWLMNT

SEQ ID NO: 544 - protein, 29 aa, Artificial Sequence
  Synthetic peptide
  MISC_FEATURE: Glucagon E16 K20 K10-C18
  MISC_FEATURE: c-term amidation
  MOD_RES (10)..(10): Covalently bound to C18 fatty acid
HSQGTFTSDKSKYLDERRAKDFVQWLMNT

SEQ ID NO: 545 - protein, 29 aa, Artificial Sequence
  Synthetic peptide
  MISC_FEATURE: Glucagon E16 K20
  MISC_FEATURE: c-term amidation
HSQGTFTSDYSKYLDERRAKDFVQWLMNT

SEQ ID NO: 546 - protein, 29 aa, Artificial Sequence
  Synthetic peptide
  MISC_FEATURE: Glucagon E16 K20 K10-W-C16 Cys 24-40K
  MISC_FEATURE: c-term amidation
  MOD_RES (10)..(10): Covalently bound to Trp residue comprising C16 fatty acid
  MOD_RES (24)..(24): Cys-PEG
HSQGTFTSDKSKYLDERRAKDFVCWLMNT

SEQ ID NO: 547 - protein, 29 aa, Artificial Sequence
  Synthetic peptide
  MISC_FEATURE: Glucagon E16 K20 K10-C18 Cys24-40K
  MISC_FEATURE: c-term amidation
  MOD_RES (10)..(10): Covalently bound to C18 fatty acid
  MOD_RES (24)..(24): Cys-PEG
HSQGTFTSDKSKYLDERRAKDFVCWLMNT

SEQ ID NO: 548 - protein, 29 aa, Artificial Sequence
  Synthetic peptide
  MISC_FEATURE: Glucagon E16 K20 K10-C18 Cys24-40K
  MISC_FEATURE: c-term amidation
  MOD_RES (10)..(10): Covalently bound to Trp residue comprising a C18 fatty acid
  MOD_RES (24)..(24): Cys-PEG
HSQGTFTSDKSKYLDERRAKDFVCWLMNT

SEQ ID NO: 549 - protein, 29 aa, Artificial Sequence
  Synthetic peptide
  MISC_FEATURE: Glucagon E16 K20 K10-C16 amide
  MISC_FEATURE: c-term amidation
  MOD_RES (10)..(10): Covalently bound to Glu residue comprising a C16 fatty acid
  MOD_RES (24)..(24): Cys-PEG
HSQGTFTSDKSKYLDERRAQDFVCWLMNT

SEQ ID NO: 550 - protein, 28 aa, Artificial Sequence
  Synthetic peptide
  MISC_FEATURE: Chimera 2 truncated by one amino acid
HSQGTFTSDYSKYLDEQAAKEFIAWLMN

SEQ ID NO: 551 - protein, 27 aa, Artificial Sequence
  Synthetic peptide
  MISC_FEATURE: Chimera 2 truncated by two amino acids
HSQGTFTSDYSKYLDEQAAKEFIAWLM

SEQ ID NO: 552 - protein, 28 aa, Artificial Sequence
  Synthetic peptide
  MISC_FEATURE: aa 1-28, E16 K20 C-terminal amide
  MISC_FEATURE: c-term amidation
HSQGTFTSDYSKYLDERRAKDFVQWLMN

SEQ ID NO: 553 - protein, 27 aa, Artificial Sequence
  Synthetic peptide
  MISC_FEATURE: aa 1-27 E16 K20 C-terminal amide
  MISC_FEATURE: c-term amidation
HSQGTFTSDYSKYLDERRAKDFVQWKM

SEQ ID NO: 554 - protein, 29 aa, Artificial Sequence
  Synthetic peptide
  MISC_FEATURE: c-term amidation
  MOD_RES (27)..(27): Norleucine
HSEGTFTSDYSKYLDEQAAKEFIAWLXNT

SEQ ID NO: 555 - protein, 39 aa, Artificial Sequence
  Synthetic peptide
  MISC_FEATURE (16)..(20): Lactam bridging side chains at positions 16 and 20
YSQGTFTSDYSKYLDEQAAKEFVNWLMNGGPSSGAPPPS

SEQ ID NO: 556 - protein, 29 aa, Artificial Sequence
  Synthetic peptide
  MISC_FEATURE: Chimera 2 with AIB at 16
  MISC_FEATURE: c-term amidation
  MOD_RES (16)..(16): Aminoisobutyric acid
HSQGTFTSDYSKYLDXQAAKEFIAWLMNT

SEQ ID NO: 557 - protein, 29 aa, Artificial Sequence
  Synthetic peptide
  MISC_FEATURE: c-term amidation
  MOD_RES (2)..(2): Aminoisobutyric acid
  MOD_RES (16)..(16): Aminoisobutyric acid
HXQGTFTSDYSKYLDXRRAQDFVQWLMNT

SEQ ID NO: 558 - protein, 29 aa, Artificial Sequence
  Synthetic peptide
  MISC_FEATURE: c-term amidation
  MOD_RES (2)..(2): Aminoisobutyric acid
  MISC_FEATURE (10)..(10): Covalently bound to Trp residue comprising a C16 fatty acid
  MOD_RES (16)..(16): Aminoisobutyric acid
  MOD_RES (24)..(24): Cys-PEG
HXQGTFTSDKSKYLDXRRAQDFVCWLMNT

SEQ ID NO: 559 - protein, 29 aa, Artificial Sequence
  Synthetic peptide
  MISC_FEATURE: c-term amidation
  MOD_RES (2)..(2): Aminoisobutric Acid
  MISC_FEATURE (10)..(10): Covalently bound to Trp residue comprising a C16 fatty acid
  MOD_RES (16)..(16): Aminoisobutric Acid
HXQGTFTSDKSKYLDXRRAQDFVCWLMNT

SEQ ID NO: 560 - protein, 29 aa, Artificial Sequence
  Synthetic peptide
  MISC_FEATURE: c-term amidation
  MOD_RES (2)..(2): Aminoisobutyric acid
  MISC_FEATURE (10)..(10): Covalently bound to Trp residue comprising a C16 fatty acid
  MOD_RES (16)..(16): Aminoisobutyric acid
  MOD_RES (20)..(20): Aminoisobutyric acid
  MOD_RES (24)..(24): Cys-PEG
HXQGTFTSDKSKYLDXRRAXDFVCWLMNT

SEQ ID NO: 561 - protein, 29 aa, Artificial Sequence
  Synthetic peptide
  MISC_FEATURE: c-term amidation
  MOD_RES (2)..(2): Aminoisobutyric acid
  MISC_FEATURE (10)..(10): Covalently bound to Trp residue comprising a C16 fatty acid
  MOD_RES (16)..(16): Aminoisobutyric acid
  MOD_RES (20)..(20): Aminoisobutyric acid
HXQGTFTSDKSKYLDXRRAXDFVCWLMNT

SEQ ID NO: 562 - protein, 29 aa, Artificial Sequence
  Synthetic peptide
  MISC_FEATURE: c-term amidation
  MOD_RES (2)..(2): Aminoisobutyric acid
  MOD_RES (16)..(16): Aminoisobutyric acid
HXQGTFTSDKSKYLDXRRAQDFVQWLMNT

SEQ ID NO: 563 - protein, 29 aa, Artificial Sequence
  Synthetic peptide
  MISC_FEATURE: c-term amidation
  MOD_RES (2)..(2): Aminoisobutyric Acid
  MOD_RES (10)..(10): Acylated with a C16 fatty acyl group
  MOD_RES (16)..(16): Aminoisobutyric Acid
HXQGTFTSDKSKYLDXRRAQDFVQWLMNT

SEQ ID NO: 564 - protein, 29 aa, Artificial Sequence
  Synthetic peptide
  MISC_FEATURE: c-term amidation
  MOD_RES (2)..(2): Aminoisobutyric Acid
  MOD_RES (10)..(10): Acylated with a C16 fatty acyl group via Ala-Ala spacer
  MOD_RES (16)..(16): Aminoisobutyric Acid
HXQGTFTSDKSKYLDXRRAQDFVQWLMNT

SEQ ID NO: 565 - protein, 29 aa, Artificial Sequence
  Synthetic peptide
  MISC_FEATURE: c-term amidation
  MOD_RES (2)..(2): Aminoisobutryic Acid
  MOD_RES (10)..(10): Acylated with a C16 fatty acyl group via gamma-Glu-gamma-Glu spacer
  MOD_RES (16)..(16): Aminoisobutryic Acid
HXQGTFTSDKSKYLDXRRAQDFVQWLMNT

SEQ ID NO: 566 - protein, 29 aa, Artificial Sequence
  Synthetic peptide
  MISC_FEATURE: c-term amidation
  MOD_RES (2)..(2): Aminoisobutryic Acid
  MOD_RES (10)..(10): Acylated with a C16 fatty acyl group via beta-Ala-beta-Ala spacer
  MOD_RES (16)..(16): Aminoisobutryic Acid
HXQGTFTSDKSKYLDXRRAQDFVQWLMNT

SEQ ID NO: 567 - protein, 29 aa, Artificial Sequence
  Synthetic peptide
  MISC_FEATURE: c-term amidation
  MOD_RES (2)..(2): Aminoisobutryic Acid
  MOD_RES (10)..(10): Acylated with a C16 fatty acyl group via 6-aminohexanoic acid spacer
  MOD_RES (16)..(16): Aminoisobutryic Acid
HXQGTFTSDKSKYLDXRRAQDFVQWLMNT

SEQ ID NO: 568 - protein, 29 aa, Artificial Sequence
  Synthetic peptide
  MISC_FEATURE: c-term amidation
  MOD_RES (2)..(2): Aminoisobutryic Acid
  MOD_RES (10)..(10): Acylated with a C16 fatty acyl group via Leu-Leu spacer
  MOD_RES (16)..(16): Aminoisobutryic Acid
HXQGTFTSDKSKYLDXRRAQDFVQWLMNT

SEQ ID NO: 569 - protein, 29 aa, Artificial Sequence
  Synthetic peptide
  MISC_FEATURE: c-term amidation
  MOD_RES (2)..(2): Aminoisobutryic Acid
  MOD_RES (10)..(10): Acylated with a C16 fatty acyl group via Pro-Pro spacer
  MOD_RES (16)..(16): Aminoisobutryic Acid
HXQGTFTSDKSKYLDXRRAQDFVQWLMNT

SEQ ID NO: 570 - protein, 29 aa, Artificial Sequence
  Synthetic peptide
  MISC_FEATURE: c-term amidation
  MOD_RES (2)..(2): Aminoisobutyric Acid
  MOD_RES (10)..(10): Acylated with a C14 fatty acyl group
  MOD_RES (16)..(16): Aminoisobutyric Acid
  MOD_RES (24)..(24): Pegylated
HXQGTFTSDKSKYLDXRRAQDFVCWLMNT

SEQ ID NO: 571 - protein, 29 aa, Artificial Sequence
  Synthetic peptide
  MISC_FEATURE: c-term amidation
  MOD_RES (2)..(2): Aminoisobutyric Acid
  MOD_RES (10)..(10): Acylated with a C14 fatty acyl group via gamma-Glu-gamma-Glu spacer
  MOD_RES (16)..(16): Aminoisobutyric Acid
  MOD_RES (24)..(24): Pegylated
HXQGTFTSDKSKYLDXRRAQDFVCWLMNT

SEQ ID NO: 572 - protein, 29 aa, Artificial Sequence
  Synthetic peptide
  MISC_FEATURE: c-term amidation
  MOD_RES (2)..(2): Aminoisobutryic Acid
  MOD_RES (10)..(10): Acylated with a C14 fatty acyl group via gamma-Glu-gamma-Glu spacer
  MOD_RES (16)..(16): Aminoisobutryic Acid
HXQGTFTSDKSKYLDXRRAQDFVQWLMNT

SEQ ID NO: 573 - protein, 29 aa, Artificial Sequence
  Synthetic peptide
  MISC_FEATURE: c-term amidation
  MOD_RES (2)..(2): Aminoisobutryic Acid
  MOD_RES (10)..(10): Acylated with a C14 fatty acyl group via Ala-Ala spacer
  MOD_RES (16)..(16): Aminoisobutryic Acid
  MOD_RES (24)..(24): Pegylated
HXQGTFTSDKSKYLDXRRAQDFVCWLMNT

SEQ ID NO: 574 - protein, 29 aa, Artificial Sequence
  Synthetic peptide
  MISC_FEATURE: c-term amidation
  MOD_RES (2)..(2): Aminoisobutryic Acid
  MOD_RES (10)..(10): Acylated with a C14 fatty acyl group via Ala-Ala spacer
  MOD_RES (16)..(16): Aminoisobutryic Acid
HXQGTFTSDKSKYLDXRRAQDFVQWLMNT

SEQ ID NO: 575 - protein, 29 aa, Artificial Sequence
  Synthetic peptide
  MISC_FEATURE: c-term amidation
  MOD_RES (2)..(2): Aminoisobutryic acid
  MOD_RES (10)..(10): Acylated with a C16 fatty acyl group via Ala-Ala spacer
  MOD_RES (16)..(16): Aminoisobutryic acid
  MOD_RES (24)..(24): Pegylated
HXQGTFTSDKSKYLDXRRAQDFVCWLMNT

SEQ ID NO: 576 - protein, 29 aa, Artificial Sequence
  Synthetic peptide
  MISC_FEATURE: c-term amidation
  MOD_RES (2)..(2): Aminoisobutryic Acid
  MOD_RES (10)..(10): Acylated with a C16 fatty acyl group via gamma-Glu-gamma-Glu spacer
  MOD_RES (16)..(16): Aminoisobutryic Acid
  MOD_RES (24)..(24): Pegylated
HXQGTFTSDKSKYLDXRRAQDFVCWLMNT

SEQ ID NO: 577 - protein, 29 aa, Artificial Sequence
  Synthetic peptide
  MISC_FEATURE: c-term amidation
  MOD_RES (10)..(10): Acylated with a C16 fatty acyl group
HSQGTFTSDKSKYLDSRRAQDFVQWLMNT

SEQ ID NO: 578 - protein, 29 aa, Artificial Sequence
  Synthetic peptide
  MISC_FEATURE: c-term amidation
  MOD_RES (10)..(10): Acylated with a C16 fatty acyl group via gamma-Glu-gamma-Glu spacer
HSQGTFTSDKSKYLDSRRAQDFVQWLMNT

SEQ ID NO: 579 - protein, 29 aa, Artificial Sequence
  Synthetic peptide
  MISC_FEATURE: AA-C16 Glucagon Amide
  MISC_FEATURE: c-term amidation
  MOD_RES (10)..(10): Acylated with a C16 fatty acyl group via Ala-Ala spacer
HSQGTFTSDKSKYLDSRRAQDFVQWLMNT

SEQ ID NO: 580 - protein, 29 aa, Artificial Sequence
  Synthetic peptide
  MISC_FEATURE: Chimera 2, AIB2, Lys10, Cys24-PEG
  MISC_FEATURE: c-term amidation
  MOD_RES (2)..(2): Aminoisobutryic Acid
  MOD_RES (24)..(24): Pegylated
HXQGTFTSDKSKYLDEQAAKEFICWLMNT

SEQ ID NO: 581 - protein, 30 aa, Artificial Sequence
  Synthetic peptide
  MISC_FEATURE: Peptide dS2E16K20K30-C14 Gluc Amide
  MISC_FEATURE: c-term amidation
  MOD_RES (2)..(2): Xaa is d-Ser
  MOD_RES (30)..(30): Acylated with a C14 fatty acyl group
HXQGTFTSDYSKYLDERRAKDFVQWLMNTK

SEQ ID NO: 582 - protein, 29 aa, Artificial Sequence
  Synthetic peptide
  MISC_FEATURE: Peptide dS2K10(C14)E16K20-Gluc Amide
  MISC_FEATURE: c-term amidation
  MOD_RES (2)..(2): Xaa is d-Ser
  MOD_RES (10)..(10): Acylated with a C14 fatty acyl group
HXQGTFTSDKSKYLDERRAKDFVQWLMNT

SEQ ID NO: 583 - protein, 30 aa, Artificial Sequence; identical to SEQ ID NO: 581
  Synthetic peptide
  MISC_FEATURE: Peptide dS2E16K20K30-C16 Gluc Amide
  MISC_FEATURE: c-term amidation
  MOD_RES (2)..(2): Xaa is d-Ser
  MOD_RES (30)..(30): Acylated with a C16 fatty acyl group

SEQ ID NO: 584 - protein, 29 aa, Artificial Sequence
  Synthetic peptide
  MISC_FEATURE: Peptide dS2K10(C16)E16K20-Gluc Amide
  MISC_FEATURE: c-term amidation
  MOD_RES (2)..(2): Xaa is d-Ser
  MOD_RES (10)..(10): Acylated with a C16 fatty acyl group
HXQGTFTSDKSKYLDERRAKDFVQWLMNT

SEQ ID NO: 585 - protein, 29 aa, Artificial Sequence
  Synthetic peptide
  MISC_FEATURE: Peptide Chimera 2-AIB2-K10-acylated
  MISC_FEATURE: c-term amidation
  MOD_RES (2)..(2): Aminoisobutryic Acid
  MOD_RES (10)..(10): Acylated with a C18 fatty acyl group
  MOD_RES (24)..(24): Pegylated
HXQGTFTSDKSKYLDEQAAKEFICWLMNT

SEQ ID NO: 586 - protein, 30 aa, Artificial Sequence
  Synthetic peptide
  MISC_FEATURE: Peptide Chimera 2-AIB2-K30-acylated
  MISC_FEATURE: c-term amidation
  MOD_RES (2)..(2): Aminoisobutryic Acid
  MOD_RES (24)..(24): Pegylated
  MOD_RES (30)..(30): Acylated with a C18 fatty acyl group
HXQGTFTSDYSKYLDEQAAKEFICWLMNTK

SEQ ID NO: 587 - protein, 29 aa, Artificial Sequence
  Synthetic peptide
  MISC_FEATURE: c-term amidation
  MOD_RES (1)..(1): DMIA
XSQGTFTSDYSKYLDERRAKDFVCWLMNT

SEQ ID NO: 588 - protein, 29 aa, Artificial Sequence
  Synthetic peptide
  MISC_FEATURE: c-term amidation
  MOD_RES (1)..(1): DMIA
  MOD_RES (16)..(20): Lactam ring between side chains of amino acids at positions 16 and 20
XSQGTFTSDYSKYLDERRAKDFVCWLMNT

SEQ ID NO: 589 - protein, 29 aa, Artificial Sequence
  Synthetic peptide
  MISC_FEATURE: c-term amidation
  MOD_RES (2)..(2): Aminoisobutryic Acid
HXEGTFTSDYSKYLDEQAAKEFICWLMNT

SEQ ID NO: 590 - protein, 29 aa, Artificial Sequence
  Synthetic peptide
  MISC_FEATURE: c-term amidation
  MOD_RES (2)..(2): Aminoisobutryic Acid
  MOD_RES (24)..(24): Pegylated
HXEGTFTSDYSKYLDEQAAKEFICWLMNT

SEQ ID NO: 591 - protein, 29 aa, Artificial Sequence
  Synthetic peptide
  MOD_RES (3)..(3): Xaa is a Glutamine analog
  MOD_RES (27)..(27): Xaa is Norleucine
HSXGTFTSDYSKYLDTRRAAEFVAWLXDE

SEQ ID NO: 592 - protein, 29 aa, Artificial Sequence
  Synthetic peptide
  MOD_RES (3)..(3): Xaa is a Glutamine analog
  MOD_RES (16)..(16): Xaa is Aib
HSXGTFTSDYSKYLDXRRAADFVAWLMDE

SEQ ID NO: 593 - protein, 29 aa, Artificial Sequence
  Synthetic peptide
  MOD_RES (27)..(27): Xaa is Norleucine
HSQGTFTSDYSKYLDTRRAAEFVAWLXDE

SEQ ID NO: 594 - protein, 29 aa, Artificial Sequence
  Synthetic peptide
  MOD_RES (3)..(3): Xaa is Acetamidomethyl-cysteine
  MOD_RES (27)..(27): Xaa is Norleucine
HSXGTFTSDYSKYLDTRRAAEFVAWLXDE

SEQ ID NO: 595 - protein, 29 aa, Artificial Sequence
  Synthetic peptide
  MOD_RES (3)..(3): Xaa is Acetyldiaminobutanoic acid
  MOD_RES (27)..(27): Xaa is Norleucine
HSXGTFTSDYSKYLDTRRAAEFVAWLXDE

SEQ ID NO: 596 - protein, 29 aa, Artificial Sequence
  Synthetic peptide
  MOD_RES (3)..(3): Xaa is carbamoyldiaminopropanoic acid
  MOD_RES (27)..(27): Xaa is Norleucine
HSXGTFTSDYSKYLDTRRAAEFVAWLXDE

SEQ ID NO: 597 - protein, 29 aa, Artificial Sequence
  Synthetic peptide
  MOD_RES (3)..(3): Xaa is Methylglutamine
  MOD_RES (27)..(27): Xaa is Norleucine
HSXGTFTSDYSKYLDTRRAAEFVAWLXDE

SEQ ID NO: 598 - protein, 29 aa, Artificial Sequence
  Synthetic peptide
  MOD_RES (3)..(3): Xaa is Methionine sulfoxide
  MOD_RES (27)..(27): Xaa is Norleucine
HSXGTFTSDYSKYLDTRRAAEFVAWLXDE

SEQ ID NO: 599 - protein, 29 aa, Artificial Sequence
  Synthetic peptide
  MOD_RES (3)..(3): Acetylornithine
  MOD_RES (27)..(27): Xaa is Norleucine
HSXGTFTSDYSKYLDTRRAAEFVAWLXDE

SEQ ID NO: 600 - protein, 29 aa, Artificial Sequence
  Synthetic peptide
  MOD_RES (16)..(16): Xaa is Aminoisobutryic Acid
HSQGTFTSDYSKYLDXRRAADFVAWLMDE

SEQ ID NO: 601 - protein, 29 aa, Artificial Sequence
  Synthetic peptide
  MOD_RES (3)..(3): Xaa is Acetyldiaminobutanoic acid
  MOD_RES (16)..(16): Xaa is Aminoisobutyric Acid
HSXGTFTSDYSKYLDXRRAADFVAWLMDE

SEQ ID NO: 602 - protein, 29 aa, Artificial Sequence
  Synthetic peptide
  MOD_RES (3)..(3): Xaa is Methylglutamine
  MOD_RES (16)..(16): Xaa is Aminoisobutyric Acid
HSXGTFTSDYSKYLDXRRAADFVAWLMDE

SEQ ID NO: 603 - protein, 29 aa, Artificial Sequence
  Synthetic peptide
  MOD_RES (3)..(3): Xaa is Acetyldiaminobutanoic acid
  MOD_RES (16)..(16): Xaa is Aminoisobutryic Acid
HSXGTFTSDYSKYLDXRRAADFVAWLLDE

SEQ ID NO: 604 - protein, 39 aa, Artificial Sequence
  Synthetic peptide
  MISC_FEATURE: c-term amidation
  MOD_RES (3)..(3): Xaa is Acetyldiaminobutanoic acid
  MOD_RES (16)..(16): Xaa is Aminoisobutyric Acid
HSXGTFTSDYSKYLDXRRAADFVAWLLDTGPSSGAPPPS

SEQ ID NO: 605 - protein, 29 aa, Artificial Sequence
  Synthetic peptide
  MOD_RES (3)..(3): Xaa is Acetyldiaminobutanoic acid
  MOD_RES (16)..(16): Xaa is Aminoisobutryic Acid
HSXGTFTSDYSKYLDXRRASDFVSWLLDE

SEQ ID NO: 606 - protein, 29 aa, Artificial Sequence
  Synthetic peptide
  MOD_RES (3)..(3): Xaa is Acetyldiaminobutanoic acid
  MOD_RES (16)..(16): Xaa is Aminoisobutryic Acid
HSXGTFTSDYSKYLDXRRATDFVTWLLDE

SEQ ID NO: 607 - protein, 29 aa, Artificial Sequence
  Synthetic peptide
  MISC_FEATURE: c-term amidation
  MOD_RES (1)..(1): Xaa is Dmia
  MOD_RES (10)..(10): Covalently bound to a C14 fatty acyl group
  MOD_RES (16)..(20): Lactam ring between side chains of amino acids at positions 16 and 20
XSQGTFTSDKSKYLDERRAKDFVQWLMNT

SEQ ID NO: 608 - protein, 29 aa, Artificial Sequence
  Synthetic peptide
  MISC_FEATURE: c-term amidation
  MOD_RES (1)..(1): DMIA
  MOD_RES (10)..(10): Covalently bound to C16 fatty acyl group
  MOD_RES (16)..(20): Lactam ring between side chains of amino acids at positions 16 and 20
XSQGTFTSDKSKYLDERRAKDFVQWLMNT

SEQ ID NO: 609 - protein, 29 aa, Artificial Sequence
  Synthetic peptide
  MISC_FEATURE: c-term amidation
  MOD_RES (1)..(1): DMIA
  MOD_RES (10)..(10): Covalently bound to C18 fatty acyl group
  MOD_RES (16)..(20): Lactam ring between side chains of amino acids at positions 16 and 20
XSQGTFTSDKSKYLDERRAKDFVQWLMNT

SEQ ID NO: 610 - protein, 29 aa, Artificial Sequence
  Synthetic peptide
  MISC_FEATURE: c-term amidation
  MOD_RES (2)..(2): Aminoisobutryic Acid
  MOD_RES (10)..(10): Covalently bound to C14 fatty acyl group
  MOD_RES (16)..(16): Aminoisobutryic Acid
HXQGTFTSDKSKYLDXRRAQDFVQWLMNT

SEQ ID NO: 611 - protein, 29 aa, Artificial Sequence
  Synthetic peptide
  MISC_FEATURE: c-term amidation
  MOD_RES (2)..(2): Aminoisobutryic Acid
  MOD_RES (10)..(10): Covalently bound to C16 fatty acyl group
  MOD_RES (16)..(16): Aminoisobutryic Acid
HXQGTFTSDKSKYLDXRRAQDFVQWLMNT

SEQ ID NO: 612 - protein, 29 aa, Artificial Sequence
  Synthetic peptide
  MISC_FEATURE: c-term amidation
  MOD_RES (2)..(2): Aminoisobutryic Acid
  MOD_RES (10)..(10): Covalently bound to C18 fatty acyl group
  MOD_RES (16)..(16): Aminoisobutryic Acid
HXQGTFTSDKSKYLDXRRAQDFVQWLMNT

SEQ ID NO: 613 - protein, 29 aa, Artificial Sequence
  Synthetic peptide
  MISC_FEATURE: c-term amidation
  MOD_RES (2)..(2): Xaa is d-Ser
  MOD_RES (10)..(10): Covalently bound to C14 fatty acyl group
HXQGTFTSDKSKYLDERRAKDFVQWLMNT

SEQ ID NO: 614 - protein, 29 aa, Artificial Sequence
  Synthetic peptide
  MISC_FEATURE: c-term amidation
  MOD_RES (2)..(2): Xaa is d-Ser
  MOD_RES (10)..(10): Covalently bound to C16 fatty acyl group
HXQGTFTSDKSKYLDERRAKDFVQWLMNT

SEQ ID NO: 615 - protein, 29 aa, Artificial Sequence
  Synthetic peptide
  MISC_FEATURE: c-term amidation
  MOD_RES (2)..(2): Xaa is d-Ser
  MOD_RES (10)..(10): Covalently bound to a C18 fatty acyl group
HXQGTFTSDKSKYLDERRAKDFVQWLMNT

SEQ ID NO: 616 - protein, 29 aa, Artificial Sequence
  Synthetic peptide
  MISC_FEATURE: c-term amidation
  MOD_RES (2)..(2): Aminoisobutyric Acid
  MOD_RES (10)..(10): Covalently bound to a C14 fatty acyl group
  MOD_RES (16)..(16): Aminoisobutyric Acid
HXQGTFTSDKSKYLDXRRAQDFVCWLMNT

SEQ ID NO: 617 - protein, 29 aa, Artificial Sequence
  Synthetic peptide
  MISC_FEATURE: c-term amidation
  MOD_RES (2)..(2): Aminoisobutryic Acid
  MOD_RES (10)..(10): Covalently bound to C14 fatty acyl group via gamma-Glu-gamma-Glu spacer
  MOD_RES (16)..(16): Aminoisobutryic Acid
HXQGTFTSDKSKYLDXRRAQDFVCWLMNT

SEQ ID NO: 618 - protein, 29 aa, Artificial Sequence
  Synthetic peptide
  MISC_FEATURE: c-term amidation
  MOD_RES (2)..(2): Aminoisobutryic Acid
  MOD_RES (10)..(10): Covalently bound to C14 fatty acyl group via Ala-Ala spacer
  MOD_RES (16)..(16): Aminoisobutryic Acid
HXQGTFTSDKSKYLDXRRAQDFVCWLMNT

SEQ ID NO: 619 - protein, 29 aa, Artificial Sequence
  Synthetic peptide
  MISC_FEATURE: c-term amidation
  MOD_RES (2)..(2): Aminoisobutyric Acid
  MOD_RES (10)..(10): Covalently bound to C16 fatty acyl group via di peptide spacer
  MOD_RES (16)..(16): Aminoisobutyric Acid
HXQGTFTSDKSKYLDXRRAQDFVCWLMNT

SEQ ID NO: 620 - protein, 29 aa, Artificial Sequence
  Synthetic peptide
  MISC_FEATURE: c-term amidation
  MOD_RES (2)..(2): Aminoisobutyric Acid
  MOD_RES (10)..(10): Covelently bound to C16 fatty acyl group via Ala-Ala spacer
  MOD_RES (16)..(16): Aminoisobutyric Acid
HXQGTFTSDKSKYLDXRRAQDFVCWLMNT

SEQ ID NO: 621 - protein, 29 aa, Artificial Sequence
  Synthetic peptide
  MISC_FEATURE: c-term amidation
  MOD_RES (2)..(2): Aminoisobutyric Acid
  MOD_RES (10)..(10): Covalently bound to C16 fatty acyl group
  MOD_RES (16)..(16): Aminoisobutyric Acid
HXQGTFTSDKSKYLDXRRAQDFVCWLMNT

SEQ ID NO: 622 - protein, 30 aa, Artificial Sequence
  Synthetic peptide
  MISC_FEATURE: c-term amidation
  MOD_RES (2)..(2): Aminoisobutyric Acid
  MOD_RES (10)..(10): Covalently bound to C16 fatty acyl group
  MOD_RES (16)..(16): Aminoisobutyric Acid
HXQGTFTSDKSKYLDXRRAQDFVCWLMNTK

SEQ ID NO: 623 - protein, 29 aa, Artificial Sequence
  Synthetic peptide
  MISC_FEATURE: beta-Ala-beta-Ala - C16 Glucagon Amide
  MISC_FEATURE: c-term amidation
  MISC_FEATURE (10)..(10): Acylated with a C16 fatty acyl group via beta-Ala-beta-Ala spacer
HSQGTFTSDKSKYLDSRRAQDFVQWLMNT

SEQ ID NO: 624 - protein, 29 aa, Artificial Sequence
  Synthetic peptide
  MISC_FEATURE: Chimera-2 Aib2C24Mal40KPEG
  MOD_RES (2)..(2): Xaa is Aib
  MOD_RES (24)..(24): Covalently bound to 40kDa PEG via thioether made by reaction of peptide with a maleimide-activated PEG
  MOD_RES (29)..(29): AMIDATION
HXQGTFTSDYSKYLDEQAAKEFICWLMNT

SEQ ID NO: 625 - protein, 29 aa, Artificial Sequence
  Synthetic peptide
  MISC_FEATURE: Chimera-2 Aib2E16K20lactamC24Mal40KPEG
  MOD_RES (2)..(2): Xaa is Aib
  MISC_FEATURE (16)..(20): Lactam ring between side chains of the amino acids at positions 16 and 20
  MOD_RES (24)..(24): Covalently bound to 40kDa PEG via thioether made by reaction of peptide with a maleimide-activated PEG
  MOD_RES (29)..(29): AMIDATION
HXQGTFTSDYSKYLDEQAAKEFICWLMNT

SEQ ID NO: 626 - protein, 29 aa, Artificial Sequence
  Synthetic peptide
  MISC_FEATURE: Glucagon Aib2E16K20lactamC24amideMal40KPEG
  MOD_RES (2)..(2): Xaa is Aib
  MISC_FEATURE (16)..(20): Lactam ring between side chains of amino acids at positions 16 and 20
  MOD_RES (24)..(24): Covalently bound to 40kDa PEG via thioether made by reaction of peptide with a maleimide-activated PEG
  MOD_RES (29)..(29): AMIDATION
HXQGTFTSDYSKYLDERRAKDFVCWLMNT

SEQ ID NO: 627 - skipped

SEQ ID NO: 628 - protein, 29 aa, Artificial Sequence
  Synthetic peptide
  MISC_FEATURE: Glucagon Dmia1E16K20lactamC24Mal40KPEG
  MOD_RES (1)..(1): Xaa is Dmia
  MISC_FEATURE (16)..(20): Lactam ring between side chains of amino acids at positions 16 and 20
  MOD_RES (24)..(24): Covalently bound to 40kDa PEG via thioether made by reaction of peptide with a maleimide-activated PEG
  MOD_RES (29)..(29): AMIDATION
XSQGTFTSDYSKYLDERRAKDFVCWLMNT

SEQ ID NO: 629 - protein, 29 aa, Artificial Sequence
  Synthetic peptide
  MISC_FEATURE: Glucagon Dmia1E16K20lactamC24Mal40KPEG
  MOD_RES (1)..(1): Xaa is Dmia
  MISC_FEATURE (16)..(20): Lactam ring between side chains of amino acids at positions 16 and 20
  MISC_FEATURE (24)..(24): Covalently bound to 40kDa PEG via thioether made by reaction of peptide with a maleimide-activated PEG
XSQGTFTSDYSKYLDERRAKDFVCWLMNT

SEQ ID NO: 630 - protein, 29 aa, Artificial Sequence
  Synthetic peptide
  MISC_FEATURE: Glucagon Dmia1E16K20lactamC24thioether40KPEG
  MOD_RES (1)..(1): Xaa is Dmia
  MISC_FEATURE (16)..(20): Lactam ring between side chains of amino acids at position 16 and 20
  MOD_RES (24)..(24): Covalently bound to 40kDa PEG via thioether made by reaction of peptide with haloacetyl-activated PEG
  MOD_RES (29)..(29): AMIDATION
XSQGTFTSDYSKYLDERRAKDFVCWLMNT

SEQ ID NO: 631 - protein, 29 aa, Artificial Sequence
  Synthetic peptide
  MISC_FEATURE: Chimera2 Aib2E3C24-Thioether40K PEG
  MOD_RES (2)..(2): Xaa is Aib
  MOD_RES (24)..(24): Covalently bound to 40kDa PEG via thioether made by reaction of peptide with haloacetyl-activated PEG
  MOD_RES (29)..(29): AMIDATION
HXEGTFTSDYSKYLDEQAAKEFICWLMNT

SEQ ID NO: 632 - protein, 29 aa, Artificial Sequence
  Synthetic peptide
  MOD_RES (1)..(1): Xaa is Dmia
  MOD_RES (24)..(24): Covalently bound to 40kDa PEG
  MOD_RES (29)..(29): AMIDATION
XSEGTFTSDYSKYLEERRAKDFVCWLMNT

SEQ ID NO: 633 - protein, 29 aa, Artificial Sequence
  Synthetic peptide
  MISC_FEATURE: Glucagon Aib2Aib16C24K10(rErE-C16) C24PEG40K amide
  MOD_RES (2)..(2): Xaa is Aib
  MOD_RES (10)..(10): Covalently bound to C14 fatty acyl group via gamma-Glu-gamma-Glu spacer
  MOD_RES (16)..(16): Xaa is Aib
  MOD_RES (24)..(24): Covalently bound to 40kDa PEG via thioether made by reaction of peptide with haloacetyl-activated PEG
  MOD_RES (29)..(29): AMIDATION
HXQGTFTSDKSKYLDXRRAQDFVCWLMNT

SEQ ID NO: 634 - protein, 29 aa, Artificial Sequence
  Synthetic peptide
  MISC_FEATURE: Glucagon Aib2Aib16K10(AA-C14)C24PEG40K TE amide
  MOD_RES (2)..(2): Xaa is Aib
  MOD_RES (10)..(10): Covalently bound to C14 fatty acyl group via Ala-Ala spacer
  MOD_RES (16)..(16): Xaa is Aib
  MOD_RES (24)..(24): Covalently bound to 40kDa PEG via thioether made by reaction of peptide with haloacetyl-activated PEG
  MOD_RES (29)..(29): AMIDATION
HXQGTFTSDKSKYLDXRRAQDFVCWLMNT

SEQ ID NO: 635 - protein, 29 aa, Artificial Sequence
  Synthetic peptide
  MISC_FEATURE: Glucagon Aib2Aib16K10(AA-C16) amide
  MOD_RES (2)..(2): Xaa is Aib
  MOD_RES (10)..(10): Covalently bound to C16 fatty acyl group via Ala-Ala spacer
  MOD_RES (16)..(16): Xaa is Aib
  MOD_RES (29)..(29): AMIDATION
HXQGTFTSDKSKYLDXRRAQDFVQWLMNT

SEQ ID NO: 636 - protein, 29 aa, Artificial Sequence
  Synthetic peptide
  MISC_FEATURE: Glucagon Aib2Aib16K10(rErE-C16) amide
  MOD_RES (2)..(2): Xaa is Aib
  MOD_RES (10)..(10): Covalently bound to C16 fatty acyl group via gamma-Glu-gamma-Glu spacer
  MOD_RES (16)..(16): Xaa is Aib
  MOD_RES (29)..(29): AMIDATION
HXQGTFTSDKSKYLDXRRAQDFVQWLMNT

SEQ ID NO: 637 - protein, 29 aa, Artificial Sequence
  Synthetic peptide
  MOD_RES (2)..(2): Xaa is Aib
  MOD_RES (16)..(16): Xaa is Aib
  MOD_RES (29)..(29): AMIDATION
HXQGTFTSDYSKYLDXRRAQDFVQWLMNT

SEQ ID NO: 638 - DNA, 20 bp, Artificial Sequence
  Synthetic primer
caaggtccagggaggttgtg

SEQ ID NO: 639 - DNA, 24 bp, Artificial Sequence
  Synthetic primer
ccaaaggtaagctgtccataagga

SEQ ID NO: 640 - DNA, 22 bp, Artificial Sequence
  Synthetic primer
ctctcccaagagtcacatgtcc

SEQ ID NO: 641 - DNA, 22 bp, Artificial Sequence
  Synthetic primer
caataactcggtcccctacaac

SEQ ID NO: 642 - protein, 29 aa, Artificial Sequence
  Synthetic peptide
HSQGTFTSDYSKYLDSRRAQDFVQWLMDT

SEQ ID NO: 643 - protein, 29 aa, Artificial Sequence
  Synthetic peptide
  MISC_FEATURE: c-term amidation
  MOD_RES (2)..(2): Xaa is d-Ser
  MOD_RES (10)..(10): Acylated with a C16 fatty acyl group via gamma-Glu spacer
HXQGTFTSDKSKYLDEQAAKEFIAWLMNT

SEQ ID NO: 644 - protein, 29 aa, Artificial Sequence
  Synthetic peptide
  MISC_FEATURE: c-term amidation
  MOD_RES (2)..(2): Xaa is d-Ser
  MOD_RES (10)..(10): Acylated with a C16 fatty acyl group via gamma-Glu-gamma-Glu spacer
HXQGTFTSDKSKYLDEQAAKEFIAWLMNT

SEQ ID NO: 645 - protein, 29 aa, Artificial Sequence
  Synthetic peptide
  MISC_FEATURE: c-term amidation
  MOD_RES (2)..(2): Xaa is Aib
  MOD_RES (10)..(10): Acylated with a C16 fatty acyl group via gamma-Glu spacer
HXQGTFTSDKSKYLDEQAAKEFIAWLMNT

SEQ ID NO: 646 - protein, 29 aa, Artificial Sequence
  Synthetic peptide
  MISC_FEATURE: c-term amidation
  MOD_RES (2)..(2): Xaa is Aib
  MOD_RES (10)..(10): Acylated with a C16 fatty acyl group via gamma-Glu-gamma-Glu spacer
HXQGTFTSDKSKYLDEQAAKEFIAWLMNT

SEQ ID NO: 647 - protein, 29 aa, Artificial Sequence
  Synthetic peptide
  MISC_FEATURE: c-term amidation
  MOD_RES (2)..(2): Xaa is Aib
  MOD_RES (10)..(10): Acylated with a C16 fatty acyl group
HXEGTFTSDKSKYLDEQAAKEFIAWLMNT

SEQ ID NO: 648 - protein, 29 aa, Artificial Sequence
  Synthetic peptide
  MISC_FEATURE: c-term amidation
  MOD_RES (2)..(2): Xaa is Aib
  MOD_RES (10)..(10): Acylated with a C16 fatty acyl group via gamma-Glu-gamma-Glu spacer
HXEGTFTSDKSKYLDEQAAKEFIAWLMNT

SEQ ID NO: 649 - protein, 29 aa, Artificial Sequence
  Synthetic peptide
  MISC_FEATURE: c-term amidation
  MOD_RES (2)..(2): Xaa is Aib
  MOD_RES (10)..(10): Acylated with a C16 fatty acyl group via gamma-Glu spacer
HXQGTFISDKSKYLDEQAAKEFIAWLMNT

SEQ ID NO: 650 - protein, 29 aa, Artificial Sequence
  Synthetic peptide
  MISC_FEATURE: c-term amidation
  MOD_RES (2)..(2): Xaa is Aib
  MOD_RES (10)..(10): Acylated with a C16 fatty acyl group via gamma-Glu-gamma-Glu spacer
HXQGTFISDKSKYLDEQAAKEFIAWLMNT

SEQ ID NO: 651 - protein, 29 aa, Artificial Sequence
  Synthetic peptide
  MISC_FEATURE: c-term amidation
  MOD_RES (1)..(1): Xaa is Dmia
  MOD_RES (10)..(10): Acylated with a C16 fatty acyl group via gamma-Glu spacer
  MISC_FEATURE (16)..(20): Lactam ring between side chains of amino acids at positions 16 and 20
XSQGTFTSDKSKYLDERRAKDFVQWLMNT

SEQ ID NO: 652 - protein, 29 aa, Artificial Sequence
  Synthetic peptide
  MISC_FEATURE: c-term amidation
  MOD_RES (1)..(1): Xaa is Dmia
  MOD_RES (10)..(10): Acylated with a C16 fatty acyl group via gamma-Glu-gamma-Glu spacer
  MISC_FEATURE (16)..(20): Lactam ring between side chains of amino acids at positions 16 and 20
XSQGTFTSDKSKYLDERRAKDFVQWLMNT

SEQ ID NO: 653 - protein, 29 aa, Artificial Sequence
  Synthetic peptide
  MISC_FEATURE: c-term amidation
  MOD_RES (1)..(1): Xaa is Dmia
  MISC_FEATURE (16)..(20): Lactam ring between side chains of amino acids at positions 16 and 20
  MOD_RES (29)..(29): Acylated with a C16 fatty acyl group via gamma-Glu spacer
XSQGTFTSDYSKYLDERRAKDFVQWLMNK

SEQ ID NO: 654 - protein, 29 aa, Artificial Sequence
  Synthetic peptide
  MISC_FEATURE: c-term amidation
  MOD_RES (1)..(1): Xaa is Dmia
  MISC_FEATURE (16)..(20): Lactam ring between side chains of amino acids at positions 16 and 20
  MOD_RES (29)..(29): Acylated with a C16 fatty acyl group via gamma-Glu-gamma-Glu spacer
XSQGTFTSDYSKYLDERRAKDFVQWLMNK

SEQ ID NO: 655 - protein, 29 aa, Artificial Sequence
  Synthetic peptide
  MISC_FEATURE: c-term amidation
  MOD_RES (2)..(2): Xaa is Aib
  MOD_RES (10)..(10): Acylated with a C16 fatty acyl group via gamma-Glu-gamma-Glu spacer
  MOD_RES (16)..(16): Xaa is Aib
HXQGTFTSDKSKYLDXRAAQDFVQWLMDT

SEQ ID NO: 656 - protein, 29 aa, Artificial Sequence
  Synthetic peptide
  MISC_FEATURE: c-term amidation
  MOD_RES (2)..(2): Xaa is Aib
  MOD_RES (10)..(10): Acylated with a C16 fatty acyl group via gamma-Glu spacer
  MOD_RES (16)..(16): Xaa is Aib
HXQGTFTSDKSKYLDXRAAQDFVQWLMDT

SEQ ID NO: 657 - protein, 29 aa, Artificial Sequence
  Synthetic peptide
  MISC_FEATURE: c-term amidation
  MOD_RES (2)..(2): Aminoisobutryic Acid
  MOD_RES (10)..(10): Acylated with a C16 fatty acyl group via dipeptide spacer
  MOD_RES (16)..(16): Aminoisobutryic Acid
HXQGTFTSDKSKYLDXRRAQDFVQWLMNT

SEQ ID NO: 658 - protein, 29 aa, Artificial Sequence
  Synthetic peptide
  MISC_FEATURE: c-term amidation
  MOD_RES (2)..(2): Aminoisobutyric Acid
  MOD_RES (10)..(10): Acylated with a C14 fatty acyl group via dipeptide spacer
  MOD_RES (16)..(16): Aminoisobutyric Acid
  MOD_RES (24)..(24): Pegylated
HXQGTFTSDKSKYLDXRRAQDFVCWLMNT

SEQ ID NO: 659 - protein, 29 aa, Artificial Sequence
  Synthetic peptide
  MISC_FEATURE: c-term amidation
  MOD_RES (2)..(2): Aminoisobutryic Acid
  MOD_RES (10)..(10): Acylated with a C14 fatty acyl group via dipeptide spacer
  MOD_RES (16)..(16): Aminoisobutryic Acid
HXQGTFTSDKSKYLDXRRAQDFVQWLMNT

SEQ ID NO: 660 - protein, 29 aa, Artificial Sequence
  Synthetic peptide
  MISC_FEATURE: c-term amidation
  MOD_RES (2)..(2): Aminoisobutryic Acid
  MOD_RES (10)..(10): Acylated with a C16 fatty acyl group via dipeptide spacer
  MOD_RES (16)..(16): Aminoisobutryic Acid
  MOD_RES (24)..(24): Pegylated
HXQGTFTSDKSKYLDXRRAQDFVCWLMNT

SEQ ID NO: 661 - protein, 29 aa, Artificial Sequence
  Synthetic peptide
  MISC_FEATURE: c-term amidation
  MOD_RES (10)..(10): Acylated with a C16 fatty acyl group via dipeptide spacer
HSQGTFTSDKSKYLDSRRAQDFVQWLMNT

SEQ ID NO: 662 - protein, 30 aa, Artificial Sequence; identical to SEQ ID NO: 581
  Synthetic peptide
  MISC_FEATURE: Peptide dS2E16K20K30-C14 Gluc Amide
  MISC_FEATURE: c-term amidation
  MOD_RES (2)..(2): D-serine, D-alanine, valine, amino n-butyric acid, glycine, N-methyl serine, aminoisobutyric acid
  MOD_RES (30)..(30): Acylated with a C14 fatty acyl group

SEQ ID NO: 663 - protein, 29 aa, Artificial Sequence
  Synthetic peptide
  MISC_FEATURE: Peptide dS2K10(C14)E16K20-Gluc Amide
  MISC_FEATURE: c-term amidation
  MOD_RES (2)..(2): D-serine, D-alanine, valine, amino n-butyric acid, glycine, N-methyl serine, aminoisobutyric acid
  MOD_RES (10)..(10): Acylated with a C14 fatty acyl group
HXQGTFTSDKSKYLDERRAKDFVQWLMNT

SEQ ID NO: 664 - protein, 30 aa, Artificial Sequence; identical to SEQ ID NO: 581
  Synthetic peptide
  MISC_FEATURE: Peptide dS2E16K20K30-C16 Gluc Amide
  MISC_FEATURE: c-term amidation
  MOD_RES (2)..(2): D-serine, D-alanine, valine, amino n-butyric acid, glycine, N-methyl serine, aminoisobutyric acid
  MOD_RES (30)..(30): Acylated with a C16 fatty acyl group

SEQ ID NO: 665 - protein, 29 aa, Artificial Sequence
  Synthetic peptide
  MISC_FEATURE: Peptide dS2K10(C16)E16K20-Gluc Amide
  MISC_FEATURE: c-term amidation
  MOD_RES (2)..(2): D-serine, D-alanine, valine, amino n-butyric acid, glycine, N-methyl serine, aminoisobutyric acid
  MOD_RES (10)..(10): Acylated with a C16 fatty acyl group
HXQGTFTSDKSKYLDERRAKDFVQWLMNT

SEQ ID NO: 666 - protein, 29 aa, Artificial Sequence
  Synthetic peptide
  MISC_FEATURE: c-term amidation
  MOD_RES (2)..(2): D-serine, D-alanine, valine, amino n-butyric acid, glycine, N-methyl serine, aminoisobutyric acid
  MOD_RES (10)..(10): Covalently bound to C14 fatty acyl group
HXQGTFTSDKSKYLDERRAKDFVQWLMNT

SEQ ID NO: 667 - protein, 29 aa, Artificial Sequence
  Synthetic peptide
  MISC_FEATURE: c-term amidation
  MOD_RES (2)..(2): D-serine, D-alanine, valine, amino n-butyric acid, glycine, N-methyl serine, aminoisobutyric acid
  MOD_RES (10)..(10): Covalently bound to C16 fatty acyl group
HXQGTFTSDKSKYLDERRAKDFVQWLMNT

SEQ ID NO: 668 - protein, 29 aa, Artificial Sequence
  Synthetic peptide
  MISC_FEATURE: c-term amidation
  MOD_RES (2)..(2): D-serine, D-alanine, valine, amino n-butyric acid, glycine, N-methyl serine, aminoisobutyric acid
  MOD_RES (10)..(10): Covalently bound to a C18 fatty acyl group
HXQGTFTSDKSKYLDERRAKDFVQWLMNT

SEQ ID NO: 669 - protein, 29 aa, Artificial Sequence
  Synthetic peptide
  MISC_FEATURE: c-term amidation
  MOD_RES (2)..(2): Aminoisobutryic Acid
  MOD_RES (10)..(10): Covalently bound to C14 fatty acyl group via dipeptide spacer
  MOD_RES (16)..(16): Aminoisobutryic Acid
HXQGTFTSDKSKYLDXRRAQDFVCWLMNT

SEQ ID NO: 670 - protein, 29 aa, Artificial Sequence
  Synthetic peptide
  MISC_FEATURE: Glucagon Aib2Aib16C24K10(rErE-C16) C24PEG40K amide
  MOD_RES (2)..(2): Xaa is Aib
  MOD_RES (10)..(10): Covalently bound to C14 fatty acyl group via dipeptide spacer
  MOD_RES (16)..(16): Xaa is Aib
  MOD_RES (24)..(24): Covalently bound to 40kDa PEG via thioether made by reaction of peptide with haloacetyl-activated PEG
  MOD_RES (29)..(29): AMIDATION
HXQGTFTSDKSKYLDXRRAQDFVCWLMNT

SEQ ID NO: 671 - protein, 29 aa, Artificial Sequence
  Synthetic peptide
  MISC_FEATURE: Glucagon Aib2Aib16K10(rErE-C16) amide
  MOD_RES (2)..(2): Xaa is Aib
  MOD_RES (10)..(10): Covalently bound to C16 fatty acyl group via dipeptide spacer
  MOD_RES (16)..(16): Xaa is Aib
  MOD_RES (29)..(29): AMIDATION
HXQGTFTSDKSKYLDXRRAQDFVQWLMNT

SEQ ID NO: 672 - protein, 29 aa, Artificial Sequence
  Synthetic peptide
  MISC_FEATURE: c-term amidation
  MOD_RES (2)..(2): D-serine, D-alanine, valine, amino n-butyric acid, glycine, N-methyl serine, aminoisobutyric acid
  MOD_RES (10)..(10): Acylated with a C16 fatty acyl group via acidic amino acid spacer
HXQGTFTSDKSKYLDEQAAKEFIAWLMNT

SEQ ID NO: 673 - protein, 29 aa, Artificial Sequence
  Synthetic peptide
  MISC_FEATURE: c-term amidation
  MOD_RES (2)..(2): D-serine, D-alanine, valine, amino n-butyric acid, glycine, N-methyl serine, aminoisobutyric acid
  MOD_RES (10)..(10): Acylated with a C16 fatty acyl group via dipeptide spacer
HXQGTFTSDKSKYLDEQAAKEFIAWLMNT

SEQ ID NO: 674 - protein, 29 aa, Artificial Sequence
  Synthetic peptide
  MISC_FEATURE: c-term amidation
  MOD_RES (2)..(2): Xaa is Aib
  MOD_RES (10)..(10): Acylated with a C16 fatty acyl group via acidic amino acid spacer
HXQGTFTSDKSKYLDEQAAKEFIAWLMNT

SEQ ID NO: 675 - protein, 29 aa, Artificial Sequence
  Synthetic peptide
  MISC_FEATURE: c-term amidation
  MOD_RES (2)..(2): Xaa is Aib
  MOD_RES (10)..(10): Acylated with a C16 fatty acyl group via dipeptide spacer
HXQGTFTSDKSKYLDEQAAKEFIAWLMNT

SEQ ID NO: 676 - protein, 29 aa, Artificial Sequence
  Synthetic peptide
  MISC_FEATURE: c-term amidation
  MOD_RES (2)..(2): Xaa is Aib
  MOD_RES (10)..(10): Acylated with a C16 fatty acyl group via dipeptide spacer
HXEGTFTSDKSKYLDEQAAKEFIAWLMNT

SEQ ID NO: 677 - protein, 29 aa, Artificial Sequence
  Synthetic peptide
  MISC_FEATURE: c-term amidation
  MOD_RES (2)..(2): Xaa is Aib
  MOD_RES (10)..(10): Acylated with a C16 fatty acyl group via acidic amino acid spacer
HXQGTFISDKSKYLDEQAAKEFIAWLMNT

SEQ ID NO: 678 - protein, 29 aa, Artificial Sequence
  Synthetic peptide
  MISC_FEATURE: c-term amidation
  MOD_RES (2)..(2): Xaa is Aib
  MOD_RES (10)..(10): Acylated with a C16 fatty acyl group via dipeptide spacer
HXQGTFISDKSKYLDEQAAKEFIAWLMNT

SEQ ID NO: 679 - protein, 29 aa, Artificial Sequence
  Synthetic peptide
  MISC_FEATURE: c-term amidation
  MOD_RES (1)..(1): Xaa is Dmia
  MOD_RES (10)..(10): Acylated with a C16 fatty acyl group via acidic amino acid spacer
  MISC_FEATURE (16)..(20): Lactam ring between side chains of amino acids at positions 16 and 20
XSQGTFTSDKSKYLDERRAKDFVQWLMNT

SEQ ID NO: 680 - protein, 29 aa, Artificial Sequence
  Synthetic peptide
  MISC_FEATURE: c-term amidation
  MOD_RES (1)..(1): Xaa is Dmia
  MOD_RES (10)..(10): Acylated with a C16 fatty acyl group via dipeptide spacer
  MISC_FEATURE (16)..(20): Lactam ring between side chains of amino acids at positions 16 and 20
XSQGTFTSDKSKYLDERRAKDFVQWLMNT

SEQ ID NO: 681 - protein, 29 aa, Artificial Sequence
  Synthetic peptide
  MISC_FEATURE: c-term amidation
  MOD_RES (1)..(1): Xaa is Dmia
  MISC_FEATURE (16)..(20): Lactam ring between side chains of amino acids at positions 16 and 20
  MOD_RES (29)..(29): Acylated with a C16 fatty acyl group via acidic amino acid spacer
XSQGTFTSDYSKYLDERRAKDFVQWLMNK

SEQ ID NO: 682 - protein, 29 aa, Artificial Sequence
  Synthetic peptide
  MISC_FEATURE: c-term amidation
  MOD_RES (1)..(1): Xaa is Dmia
  MISC_FEATURE (16)..(20): Lactam ring between side chains of amino acids at positions 16 and 20
  MOD_RES (29)..(29): Acylated with a C16 fatty acyl group via dipeptide spacer
XSQGTFTSDYSKYLDERRAKDFVQWLMNK

SEQ ID NO: 683 - protein, 29 aa, Artificial Sequence
  Synthetic peptide
  MISC_FEATURE: c-term amidation
  MOD_RES (2)..(2): Xaa is Aib
  MOD_RES (10)..(10): Acylated with a C16 fatty acyl group via dipeptide spacer
  MOD_RES (16)..(16): Xaa is Aib
HXQGTFTSDKSKYLDXRAAQDFVQWLMDT

SEQ ID NO: 684 - protein, 29 aa, Artificial Sequence
  Synthetic peptide
  MISC_FEATURE: c-term amidation
  MOD_RES (2)..(2): Xaa is Aib
  MOD_RES (10)..(10): Acylated with a C16 fatty acyl group via acidic amino acid spacer
  MOD_RES (16)..(16): Xaa is Aib
HXQGTFTSDKSKYLDXRAAQDFVQWLMDT

SEQ ID NO: 685 - protein, 29 aa, Artificial Sequence
  Synthetic peptide
  MOD_RES (2)..(2): Xaa is AIB
  misc_feature (16)..(16): Xaa can be any naturally occurring amino acid
  misc_feature (20)..(20): Xaa can be any naturally occurring amino acid
  MOD_RES (29)..(29): C-terminal amidation
HSQGTFTSDYSKYLDXQAAXGFIAWLMNT

SEQ ID NO: 686 - protein, 29 aa, Artificial Sequence
  Synthetic peptide
  MOD_RES (2)..(2): Xaa is AIB
  MOD_RES (10)..(10): Acylated with C16 fatty acyl group
  MOD_RES (16)..(16): Xaa is AIB
  MOD_RES (29)..(29): C-terminal amidation
HXQGTFTSDKSKYLDXRAAQDFVQWLMDT

SEQ ID NO: 687 - protein, 29 aa, Artificial Sequence
  Synthetic peptide
  MOD_RES (2)..(2): Xaa is AIB
  MOD_RES (10)..(10): Acylated with C14 fatty acyl group via dipeptide spacer
  MOD_RES (16)..(16): Xaa is AIB
  MOD_RES (29)..(29): C-terminal amidation
HXQGTFTSDKSKYLDXRAAQDFVQWLMDT

SEQ ID NO: 688 - protein, 29 aa, Artificial Sequence
  Synthetic peptide
  MOD_RES (2)..(2): Xaa is AIB
  MOD_RES (10)..(10): Acylated with C18 fatty acyl group via dipeptide spacer
  MOD_RES (16)..(16): Xaa is AIB
  MOD_RES (29)..(29): C-terminal amidation
HXQGTFTSDKSKYLDXRAAQDFVQWLMDT

SEQ ID NO: 689 - protein, 29 aa, Artificial Sequence
  Synthetic peptide
  MOD_RES (2)..(2): Xaa is AIB
  MOD_RES (10)..(10): Acylated with C16 fatty acyl group via dipeptide spacer
  MOD_RES (16)..(16): Xaa is AIB
  MOD_RES (29)..(29): C-terminal amidation
HXEGTFTSDKSKYLDXRAAQDFVQWLMDT

SEQ ID NO: 690 - protein, 29 aa, Artificial Sequence
  Synthetic peptide
  MOD_RES (2)..(2): Xaa is AIB
  MOD_RES (10)..(10): Acylated with C16 fatty acyl group via dipeptide spacer
  MOD_RES (16)..(16): Xaa is AIB
HXQGTFISDKSKYLDXRAAQDFVQWLMDT

SEQ ID NO: 691 - protein, 29 aa, Artificial Sequence
  Synthetic peptide
  MOD_RES (2)..(2): Xaa is AIB
  MOD_RES (10)..(10): Acylated with C16 fatty acyl group via dipeptide spacer
  MOD_RES (29)..(29): C-terminal amidation
HXQGTFTSDKSKYLDERAAQDFVQWLMDT

SEQ ID NO: 692 - protein, 29 aa, Artificial Sequence
  Synthetic peptide
  MOD_RES (2)..(2): Xaa is AIB
  MOD_RES (10)..(10): Acylated with C16 fatty acyl group via dipeptide spacer
  MOD_RES (16)..(16): Xaa is AIB
  MOD_RES (29)..(29): C-terminal amidation
HXQGTFTSDKSKYLEXRAAQDFVQWLMDT

SEQ ID NO: 693 - protein, 29 aa, Artificial Sequence
  Synthetic peptide
  MOD_RES (2)..(2): d-Ser
  MOD_RES (10)..(10): Acylated with C16 fatty acyl group via dipeptide spacer
  MOD_RES (16)..(16): Xaa is AIB
  MOD_RES (29)..(29): C-terminal amidation
HSQGTFTSDKSKYLDXRAAQDFVQWLMDT

SEQ ID NO: 694 - protein, 29 aa, Artificial Sequence
  Synthetic peptide
  MOD_RES (2)..(2): Xaa is AIB
  MOD_RES (10)..(10): Acylated with C16 fatty acyl group via dipeptide spacer
  MOD_RES (16)..(16): Xaa is AIB
  MOD_RES (29)..(29): C-terminal amidation
HXQGTFTSDKSKYLDXRAAQDFVQWLLDT

SEQ ID NO: 695 - protein, 29 aa, Artificial Sequence
  Synthetic peptide
  MOD_RES (2)..(2): Xaa is AIB
  MOD_RES (10)..(10): Acylated with C16 fatty acyl group via dipeptide spacer
  MOD_RES (29)..(29): C-terminal amidation
HXQGTFTSDKSKYLDEQAAKEFIAWLLDT

SEQ ID NO: 696 - protein, 29 aa, Artificial Sequence
  Synthetic peptide
  MOD_RES (2)..(2): Xaa is AIB
  MOD_RES (10)..(10): Acylated with C16 fatty acyl group via gamma-Glu spacer
  MOD_RES (29)..(29): C-terminal amidation
HXQGTFTSDKSKYLDEQAAKEFICWLLDT

SEQ ID NO: 697 - protein, 29 aa, Artificial Sequence
  Synthetic peptide
  MOD_RES (2)..(2): Xaa is AIB
  MOD_RES (10)..(10): Acylated with C16 fatty acyl group via gamma-Glu spacer
  MOD_RES (24)..(24): PEGYLATION
  MOD_RES (29)..(29): C-terminal amidation
HXQGTFTSDKSKYLDEQAAKEFICWLLDT

SEQ ID NO: 698 - protein, 29 aa, Artificial Sequence
  Synthetic peptide
  MOD_RES (2)..(2): Xaa is AIB
  MOD_RES (10)..(10): Acylated with C16 fatty acyl group via gamma-Glu spacer
  MOD_RES (24)..(24): PEGYLATION
  MOD_RES (29)..(29): C-terminal amidation
HXQGTFTSDKSKYLDERAAQDFVCWLLDT

SEQ ID NO: 699 - protein, 30 aa, Artificial Sequence
  Synthetic peptide
  MOD_RES (2)..(2): Xaa is AIB
  MOD_RES (10)..(10): Acylated with C16 fatty acyl group via gamma-Glu spacer
  MOD_RES (30)..(30): PEGYLATION
  MOD_RES (30)..(30): C-terminal amidation
HXQGTFTSDKSKYLDEQAAKEFIQWLLDTC

SEQ ID NO: 700 - protein, 29 aa, Artificial Sequence
  Synthetic peptide
  MOD_RES (10)..(10): Acylated with C16 fatty acyl group via gamma-Glu spacer
  MOD_RES (24)..(24): PEGYLATION
  MOD_RES (29)..(29): C-terminal amidation
HAQGTFTSDKSKYLDERAAQDFVCWLLDT

SEQ ID NO: 701 - protein, 29 aa, Artificial Sequence
  Synthetic peptide
  MOD_RES (2)..(2): d-Ser
  MOD_RES (10)..(10): Acylated with C16 fatty acyl group via gamma-Glu spacer
  MOD_RES (29)..(29): C-terminal amidation
HSQGTFTSDKSKYLDEQAAKEFICWLLDT

SEQ ID NO: 702 - protein, 29 aa, Artificial Sequence
  Synthetic peptide
  MOD_RES (2)..(2): d-Ser
  MOD_RES (10)..(10): Acylated with C16 fatty acyl group via gamma-Glu spacer
  MOD_RES (29)..(29): C-terminal amidation
HSQGTFTSDKSKYLDERAAQDFVQWLLDT

SEQ ID NO: 703 - protein, 29 aa, Artificial Sequence
  Synthetic peptide
  MOD_RES (2)..(2): d-Ser
  MOD_RES (10)..(10): Acylated with C16 fatty acyl group via gamma-Glu spacer
  MOD_RES (29)..(29): C-terminal amidation
HSQGTFTSDKSKYLDERAAQDFVCWLLDT

SEQ ID NO: 704 - protein, 29 aa, Artificial Sequence
  Synthetic peptide
  MOD_RES (2)..(2): d-Ser
  MOD_RES (10)..(10): Acylated with C16 fatty acyl group via gamma-Glu spacer
HSQGTFTSDKSKYLDEQAAKEFICWLLDT

SEQ ID NO: 705 - protein, 31 aa, Artificial Sequence
  Synthetic peptide
  MOD_RES (2)..(2): d-Ser
  MOD_RES (10)..(10): Acylated with C16 fatty acyl group via gamma-Glu spacer
  MOD_RES (31)..(31): C-terminal amidation
HSQGTFTSDKSKYLDEQAAKEFICWLLDTGE

SEQ ID NO: 706 - protein, 31 aa, Artificial Sequence
  Synthetic peptide
  MOD_RES (2)..(2): d-Ser
  MOD_RES (10)..(10): Acylated with C16 fatty acyl group via gamma-Glu spacer
  MOD_RES (24)..(24): PEGYLATION
HSQGTFTSDKSKYLDEQAAKEFICWLLDTGG

SEQ ID NO: 707 - protein, 29 aa, Artificial Sequence
  Synthetic peptide
  MOD_RES (2)..(2): d-Ser
  MOD_RES (10)..(10): Acylated with C16 fatty acyl group via gamma-Glu spacer
  MOD_RES (24)..(24): PEGYLATION
  MOD_RES (29)..(29): C-terminal amidation
HSQGTFTSDKSKYLDERAAQDFVCWLLDT

SEQ ID NO: 708 - protein, 30 aa, Artificial Sequence
  Synthetic peptide
  MOD_RES (2)..(2): d-Ser
  MOD_RES (10)..(10): Acylated with C16 fatty acyl group via gamma-Glu spacer
  MOD_RES (30)..(30): PEGYLATION
  MOD_RES (30)..(30): C-terminal amidation
HSQGTFTSDKSKYLDERAAQDFVQWLLDTC

SEQ ID NO: 709 - protein, 30 aa, Artificial Sequence
  Synthetic peptide
  MOD_RES (2)..(2): d-Ser
  MOD_RES (10)..(10): Acylated with C16 fatty acyl group via gamma-Glu spacer
  MOD_RES (24)..(24): PEGYLATION
  MOD_RES (30)..(30): C-terminal amidation
HSQGTFTSDYSKYLDSRRAQDFVQWLMNTE

SEQ ID NO: 710 - protein, 30 aa, Artificial Sequence
  Synthetic peptide
  MOD_RES (2)..(2): d-Ser
  MOD_RES (10)..(10): Acylated with C16 fatty acyl group via gamma-Glu spacer
  MOD_RES (24)..(24): PEGYLATION
HSQGTFTSDKSKYLDEQAAKEFICWLLDTC

SEQ ID NO: 711 - protein, 29 aa, Artificial Sequence
  Synthetic peptide
  MOD_RES (1)..(1): Xaa is DMIA
  MOD_RES (10)..(10): Acylated with C16 fatty acyl group via gamma-Glu spacer
  MOD_RES (29)..(29): C-terminal amidation
XSQGTFTSDKSKYLDEQAAKEFICWLLDT

SEQ ID NO: 712 - protein, 29 aa, Artificial Sequence
  Synthetic peptide
  MOD_RES (1)..(1): des-amino-His
  MOD_RES (10)..(10): Acylated with C16 fatty acyl group via gamma-Glu spacer
  MOD_RES (29)..(29): C-terminal amidation
HSQGTFTSDKSKYLDEQAAKEFICWLLDT

SEQ ID NO: 713 - protein, 29 aa, Artificial Sequence
  Synthetic peptide
  MOD_RES (1)..(1): Ac-His
  MOD_RES (10)..(10): Acylated with C16 fatty acyl group via gamma-Glu spacer
  MOD_RES (24)..(24): PEGYLATION
  MOD_RES (29)..(29): C-terminal amidation
HSQGTFTSDKSKYLDEQAAKEFICWLLDT

SEQ ID NO: 714 - protein, 29 aa, Artificial Sequence
  Synthetic peptide
  MOD_RES (2)..(2): Xaa is AIB
  MOD_RES (10)..(10): Acylated with C16 fatty acyl group via gamma-Glu spacer
  MOD_RES (29)..(29): C-terminal amidation
HXQGTFTSDKSKYLDEEAVRLFIEWLMNT

SEQ ID NO: 715 - protein, 29 aa, Artificial Sequence
  Synthetic peptide
  MOD_RES (2)..(2): Xaa is AIB
  MOD_RES (10)..(10): Acylated with C16 fatty acyl group
  MOD_RES (29)..(29): C-terminal amidation
HXQGTFTSDKSKYLDEEAVRLFIEWLMNT

SEQ ID NO: 716 - protein, 29 aa, Artificial Sequence
  Synthetic peptide
  MOD_RES (2)..(2): Xaa is AIB
  MOD_RES (24)..(24): PEGYLATION
  MOD_RES (29)..(29): C-terminal amidation
HXQGTFTSDYSKYLDEEAVRLFICWLMNT

SEQ ID NO: 717 - protein, 29 aa, Artificial Sequence
  Synthetic peptide
  MOD_RES (2)..(2): Xaa is AIB
  MOD_RES (29)..(29): C-terminal amidation
HXQGTFTSDYSKYLDEEAVRLFIEWLMNT

SEQ ID NO: 718 - protein, 29 aa, Artificial Sequence
  Synthetic peptide
  MOD_RES (2)..(2): Xaa is AIB
  MOD_RES (29)..(29): C-terminal amidation
HXQGTFTSDYSKYLDEEAVRLFICWLMNT

SEQ ID NO: 719 - protein, 29 aa, Artificial Sequence
  Synthetic peptide
  MOD_RES (2)..(2): d-Ser
  MOD_RES (24)..(24): PEGYLATION
  MOD_RES (29)..(29): C-terminal amidation
HSQGTFTSDYSKYLDEEAVRLFICWLMNT

SEQ ID NO: 720 - protein, 29 aa, Artificial Sequence
  Synthetic peptide
  MOD_RES (2)..(2): d-Ser
  MOD_RES (29)..(29): C-terminal amidation
HSQGTFTSDYSKYLDEEAVRLFIEWLMNT

SEQ ID NO: 721 - protein, 29 aa, Artificial Sequence
  Synthetic peptide
  MOD_RES (2)..(2): d-Ser
  MOD_RES (29)..(29): C-terminal amidation
HSQGTFTSDYSKYLDEEAVRLFICWLMNT

SEQ ID NO: 722 - protein, 29 aa, Artificial Sequence
  Synthetic peptide
  MOD_RES (10)..(10): Acylated with C16 fatty acyl group via acidic amino acid spacer
  MOD_RES (29)..(29): C-terminal amidation
HSQGTFTSDKSKYLDEEAVRLFIEWLMNT

SEQ ID NO: 723 - protein, 29 aa, Artificial Sequence
  Synthetic peptide
  MOD_RES (10)..(10): Acylated with C16 fatty acyl group via gamma-Glu spacer
  MOD_RES (29)..(29): C-terminal amidation
HSQGTFTSDKSKYLDEEAVRLFIEWLMNT

SEQ ID NO: 724 - protein, 29 aa, Artificial Sequence
  Synthetic peptide
  MOD_RES (2)..(2): Xaa is AIB
  MISC_FEATURE (16)..(20): Salt bridge
  MISC_FEATURE (17)..(21): Salt bridge
  MOD_RES (24)..(24): PEGYLATION
  MOD_RES (29)..(29): C-terminal amidation
HXQGTFTSDYSKYLDEKRAKEFVCWLMNT

SEQ ID NO: 725 - protein, 29 aa, Artificial Sequence
  Synthetic peptide
  MOD_RES (2)..(2): Xaa is AIB
  MOD_RES (16)..(16): Xaa is AIB
  MISC_FEATURE (16)..(20): Salt bridge
  MISC_FEATURE (17)..(21): Salt bridge
  MOD_RES (24)..(24): PEGYLATION
  MOD_RES (29)..(29): C-terminal amidation
HXQGTFTSDYSKYLDXKRAKEFVCWLMNT

SEQ ID NO: 726 - protein, 29 aa, Artificial Sequence
  Synthetic peptide
  MOD_RES (2)..(2): d-Ser
  MISC_FEATURE (16)..(20): Salt bridge
  MISC_FEATURE (17)..(21): Salt bridge
  MOD_RES (24)..(24): PEGYLATION
  MOD_RES (29)..(29): C-terminal amidation
HSQGTFTSDYSKYLDEKRAKEFVCWLMNT

SEQ ID NO: 727 - protein, 29 aa, Artificial Sequence
  Synthetic peptide
  MOD_RES (2)..(2): d-Ser
  MOD_RES (16)..(16): Xaa is AIB
  MISC_FEATURE (16)..(20): Salt bridge
  MISC_FEATURE (17)..(21): Salt bridge
  MOD_RES (24)..(24): PEGYLATION
  MOD_RES (29)..(29): C-terminal amidation
HSQGTFTSDYSKYLDXKRAKEFVCWLMNT

SEQ ID NO: 728 - protein, 29 aa, Artificial Sequence
  Synthetic peptide
  MOD_RES (2)..(2): d-Ser
  MISC_FEATURE (16)..(20): Salt bridge
  MISC_FEATURE (17)..(21): Salt bridge
  MOD_RES (29)..(29): C-terminal amidation
HSQGTFTSDYSKYLDEKRAKEFVQWLMNT

SEQ ID NO: 729 - protein, 29 aa, Artificial Sequence
  Synthetic peptide
  MOD_RES (2)..(2): D-serine, D-alanine, valine, amino n-butyric acid, glycine, N-methyl serine, aminoisobutyric acid
  MOD_RES (16)..(16): Xaa is AIB
  MISC_FEATURE (16)..(20): Salt bridge
  MISC_FEATURE (17)..(21): Salt bridge
  MOD_RES (29)..(29): C-terminal amidation
HSQGTFTSDYSKYLDXKRAKEFVQWLMNT

SEQ ID NO: 730 - protein, 29 aa, Artificial Sequence
  Synthetic peptide
  MOD_RES (2)..(2): D-serine, D-alanine, valine, amino n-butyric acid, glycine, N-methyl serine, aminoisobutyric acid
  MOD_RES (10)..(10): Acylated with C16 fatty acyl group via gamma-Glu spacer
  MISC_FEATURE (15)..(20): Salt bridge
  MOD_RES (16)..(16): Xaa is AIB
  MISC_FEATURE (16)..(21): Salt bridge
  MOD_RES (29)..(29): C-terminal amidation
HSQGTFTSDKSKYLDXKRAKEFVQWLMNT

SEQ ID NO: 731 - protein, 29 aa, Artificial Sequence
  Synthetic peptide
  MOD_RES (1)..(1): Xaa is DMIA
  MOD_RES (16)..(16): Xaa is AIB
  MISC_FEATURE (16)..(20): Salt bridge
  MISC_FEATURE (17)..(21): Salt bridge
  MOD_RES (24)..(24): PEGYLATION
  MOD_RES (29)..(29): C-terminal amidation
XSQGTFTSDYSKYLDXKRAKEFVCWLMNT

SEQ ID NO: 732 - protein, 29 aa, Artificial Sequence
  Synthetic peptide
  MISC_FEATURE (16)..(20): Salt bridge
  MISC_FEATURE (17)..(21): Salt bridge
  MOD_RES (29)..(29): C-terminal amidation
HSQGTFTSDYSKYLDEKRAKEFVQWLMNT

SEQ ID NO: 733 - protein, 29 aa, Artificial Sequence
  Synthetic peptide
  MOD_RES (2)..(2): D-serine, D-alanine, valine, amino n-butyric acid, glycine, N-methyl serine, aminoisobutyric acid
  MOD_RES (10)..(10): Acylated with C16 fatty acyl group via dipeptide spacer
  MOD_RES (16)..(16): Xaa is AIB
  MOD_RES (29)..(29): C-terminal amidation
HXQGTFTSDKSKYLDXRAAQDFVQWLMDT

SEQ ID NO: 734 - protein, 29 aa, Artificial Sequence
  Synthetic peptide
  MOD_RES (2)..(2): Xaa is AIB
  MOD_RES (10)..(10): Acylated with C16 fatty acyl group via acidic amino acid spacer
  MOD_RES (29)..(29): C-terminal amidation
HXQGTFTSDKSKYLDEQAAKEFICWLLDT

SEQ ID NO: 735 - protein, 29 aa, Artificial Sequence
  Synthetic peptide
  MOD_RES (2)..(2): Xaa is AIB
  MOD_RES (10)..(10): Acylated with C16 fatty acyl group via acidic amino acid spacer
  MOD_RES (24)..(24): PEGYLATION
  MOD_RES (29)..(29): C-terminal amidation
HXQGTFTSDKSKYLDEQAAKEFICWLLDT

SEQ ID NO: 736 - protein, 29 aa, Artificial Sequence
  Synthetic peptide
  MOD_RES (2)..(2): Xaa is AIB
  MOD_RES (10)..(10): Acylated with C16 fatty acyl group via acidic amino acid spacer
  MOD_RES (24)..(24): PEGYLATION
  MOD_RES (29)..(29): C-terminal amidation
HXQGTFTSDKSKYLDERAAQDFVCWLLDT

SEQ ID NO: 737 - protein, 30 aa, Artificial Sequence; identical to SEQ ID NO: 699
  Synthetic peptide
  MOD_RES (2)..(2): Xaa is AIB
  MOD_RES (10)..(10): Acylated with C16 fatty acyl group via acidic amino acid spacer
  MOD_RES (30)..(30): PEGYLATION
  MOD_RES (30)..(30): C-terminal amidation

SEQ ID NO: 738 - protein, 29 aa, Artificial Sequence
  Synthetic peptide
  MOD_RES (10)..(10): Acylated with C16 fatty acyl group via acidic amino acid spacer
  MOD_RES (24)..(24): PEGYLATION
  MOD_RES (29)..(29): C-terminal amidation
HAQGTFTSDKSKYLDERAAQDFVCWLLDT

SEQ ID NO: 739 - protein, 29 aa, Artificial Sequence
  Synthetic peptide
  MOD_RES (2)..(2): D-serine, D-alanine, valine, amino n-butyric acid, glycine, N-methyl serine, aminoisobutyric acid
  MOD_RES (10)..(10): Acylated with C16 fatty acyl group via acidic amino acid spacer
  MOD_RES (29)..(29): C-terminal amidation
HXQGTFTSDKSKYLDEQAAKEFICWLLDT

SEQ ID NO: 740 - protein, 29 aa, Artificial Sequence
  Synthetic peptide
  MOD_RES (2)..(2): D-serine, D-alanine, valine, amino n-butyric acid, glycine, N-methyl serine, aminoisobutyric acid
  MOD_RES (10)..(10): Acylated with C16 fatty acyl group via acidic amino acid spacer
  MOD_RES (29)..(29): C-terminal amidation
HXQGTFTSDKSKYLDERAAQDFVQWLLDT

SEQ ID NO: 741 - protein, 29 aa, Artificial Sequence
  Synthetic peptide
  MOD_RES (2)..(2): D-serine, D-alanine, valine, amino n-butyric acid, glycine, N-methyl serine, aminoisobutyric acid
  MOD_RES (10)..(10): Acylated with C16 fatty acyl group via acidic amino acid spacer
  MOD_RES (29)..(29): C-terminal amidation
HXQGTFTSDKSKYLDERAAQDFVCWLLDT

SEQ ID NO: 742 - protein, 29 aa, Artificial Sequence
  Synthetic peptide
  MOD_RES (2)..(2): D-serine, D-alanine, valine, amino n-butyric acid, glycine, N-methyl serine, aminoisobutyric acid
  MOD_RES (10)..(10): Acylated with C16 fatty acyl group via acidic amino acid spacer
HXQGTFTSDKSKYLDEQAAKEFICWLLDT

SEQ ID NO: 743 - protein, 31 aa, Artificial Sequence
  Synthetic peptide
  MOD_RES (2)..(2): D-serine, D-alanine, valine, amino n-butyric acid, glycine, N-methyl serine, aminoisobutyric acid
  MOD_RES (10)..(10): Acylated with C16 fatty acyl group via acidic amino acid spacer
  MOD_RES (31)..(31): C-terminal amidation
HXQGTFTSDKSKYLDEQAAKEFICWLLDTGE

SEQ ID NO: 744 - protein, 31 aa, Artificial Sequence
  Synthetic peptide
  MOD_RES (2)..(2): D-serine, D-alanine, valine, amino n-butyric acid, glycine, N-methyl serine, aminoisobutyric acid
  MOD_RES (10)..(10): Acylated with C16 fatty acyl group via acidic amino acid spacer
  MOD_RES (24)..(24): PEGYLATION
HXQGTFTSDKSKYLDEQAAKEFICWLLDTGG

SEQ ID NO: 745 - protein, 29 aa, Artificial Sequence
  Synthetic peptide
  MOD_RES (2)..(2): D-serine, D-alanine, valine, amino n-butyric acid, glycine, N-methyl serine, aminoisobutyric acid
  MOD_RES (10)..(10): Acylated with C16 fatty acyl group via acidic amino acid spacer
  MOD_RES (24)..(24): PEGYLATION
  MOD_RES (29)..(29): C-terminal amidation
HXQGTFTSDKSKYLDERAAQDFVCWLLDT

SEQ ID NO: 746 - protein, 30 aa, Artificial Sequence
  Synthetic peptide
  MOD_RES (2)..(2): D-serine, D-alanine, valine, amino n-butyric acid, glycine, N-methyl serine, aminoisobutyric acid
  MOD_RES (10)..(10): Acylated with C16 fatty acyl group via acidic amino acid spacer
  MOD_RES (30)..(30): PEGYLATION
  MOD_RES (30)..(30): C-terminal amidation
HXQGTFTSDKSKYLDERAAQDFVQWLLDTC

SEQ ID NO: 747 - protein, 30 aa, Artificial Sequence
  Synthetic peptide
  MOD_RES (2)..(2): D-serine, D-alanine, valine, amino n-butyric acid, glycine, N-methyl serine, aminoisobutyric acid
  MOD_RES (10)..(10): Acylated with C16 fatty acyl group via acidic amino acid spacer
  MOD_RES (24)..(24): PEGYLATION
  MOD_RES (30)..(30): C-terminal amidation
HXQGTFTSDYSKYLDSRRAQDFVQWLMNTE

SEQ ID NO: 748 - protein, 30 aa, Artificial Sequence
  Synthetic peptide
  MOD_RES (2)..(2): D-serine, D-alanine, valine, amino n-butyric acid, glycine, N-methyl serine, aminoisobutyric acid
  MOD_RES (10)..(10): Acylated with C16 fatty acyl group via acidic amino acid spacer
  MOD_RES (24)..(24): PEGYLATION
HXQGTFTSDKSKYLDEQAAKEFICWLLDTC

SEQ ID NO: 749 - protein, 29 aa, Artificial Sequence
  Synthetic peptide
  MOD_RES (1)..(1): Xaa is DMIA
  MOD_RES (10)..(10): Acylated with C16 fatty acyl group via acidic amino acid spacer
  MOD_RES (29)..(29): C-terminal amidation
XSQGTFTSDKSKYLDEQAAKEFICWLLDT

SEQ ID NO: 750 - protein, 29 aa, Artificial Sequence
  Synthetic peptide
  MOD_RES (1)..(1): des-amino-His
  MOD_RES (10)..(10): Acylated with C16 fatty acyl group via acidic amino acid spacer
  MOD_RES (29)..(29): C-terminal amidation
HSQGTFTSDKSKYLDEQAAKEFICWLLDT

SEQ ID NO: 751 - protein, 29 aa, Artificial Sequence
  Synthetic peptide
  MOD_RES (1)..(1): Ac-His
  MOD_RES (10)..(10): Acylated with C16 fatty acyl group via acidic amino acid spacer
  MOD_RES (24)..(24): PEGYLATION
  MOD_RES (29)..(29): C-terminal amidation
HSQGTFTSDKSKYLDEQAAKEFICWLLDT

SEQ ID NO: 752 - protein, 29 aa, Artificial Sequence
  Synthetic peptide
  MOD_RES (2)..(2): Xaa is AIB
  MOD_RES (10)..(10): Acylated with C16 fatty acyl group via acidic amino acid spacer
  MOD_RES (29)..(29): C-terminal amidation
HXQGTFTSDKSKYLDEEAVRLFIEWLMNT

SEQ ID NO: 753 - protein, 29 aa, Artificial Sequence
  Synthetic peptide
  MOD_RES (2)..(2): D-serine, D-alanine, valine, amino n-butyric acid, glycine, N-methyl serine, aminoisobutyric acid
  MOD_RES (24)..(24): PEGYLATION
  MOD_RES (29)..(29): C-terminal amidation
HXQGTFTSDYSKYLDEEAVRLFICWLMNT

SEQ ID NO: 754 - protein, 29 aa, Artificial Sequence
  Synthetic peptide
  MOD_RES (2)..(2): D-serine, D-alanine, valine, amino n-butyric acid, glycine, N-methyl serine, aminoisobutyric acid
  MOD_RES (29)..(29): C-terminal amidation
HXQGTFTSDYSKYLDEEAVRLFIEWLMNT

SEQ ID NO: 755 - protein, 29 aa, Artificial Sequence
  Synthetic peptide
  MOD_RES (2)..(2): D-serine, D-alanine, valine, amino n-butyric acid, glycine, N-methyl serine, aminoisobutyric acid
  MOD_RES (29)..(29): C-terminal amidation
HXQGTFTSDYSKYLDEEAVRLFICWLMNT

SEQ ID NO: 756 - protein, 29 aa, Artificial Sequence
  Synthetic peptide
  MOD_RES (10)..(10): Acylated with C16 fatty acyl group via acidic amino acid spacer
  MOD_RES (29)..(29): C-terminal amidation
HSQGTFTSDKSKYLDEEAVRLFIEWLMNT

SEQ ID NO: 757 - protein, 29 aa, Artificial Sequence
  Synthetic peptide
  MOD_RES (2)..(2): D-serine, D-alanine, valine, amino n-butyric acid, glycine, N-methyl serine, aminoisobutyric acid
  MISC_FEATURE (16)..(20): Salt bridge
  MISC_FEATURE (17)..(21): Salt bridge
  MOD_RES (24)..(24): PEGYLATION
  MOD_RES (29)..(29): C-terminal amidation
HXQGTFTSDYSKYLDEKRAKEFVCWLMNT

SEQ ID NO: 758 - protein, 29 aa, Artificial Sequence
  Synthetic peptide
  MOD_RES (2)..(2): D-serine, D-alanine, valine, amino n-butyric acid, glycine, N-methyl serine, aminoisobutyric acid
  MOD_RES (16)..(16): Xaa is AIB
  MISC_FEATURE (16)..(20): Salt bridge
  MISC_FEATURE (17)..(21): Salt bridge
  MOD_RES (24)..(24): PEGYLATION
  MOD_RES (29)..(29): C-terminal amidation
HSQGTFTSDYSKYLDXKRAKEFVCWLMNT

SEQ ID NO: 759 - protein, 29 aa, Artificial Sequence
  Synthetic peptide
  MOD_RES (2)..(2): D-serine, D-alanine, valine, amino n-butyric acid, glycine, N-methyl serine, aminoisobutyric acid
  MISC_FEATURE (16)..(20): Salt bridge
  MISC_FEATURE (17)..(21): Salt bridge
  MOD_RES (29)..(29): C-terminal amidation
HSQGTFTSDYSKYLDEKRAKEFVQWLMNT

SEQ ID NO: 760 - protein, 29 aa, Artificial Sequence
  Synthetic peptide
  MOD_RES (2)..(2): D-serine, D-alanine, valine, amino n-butyric acid, glycine, N-methyl serine, aminoisobutyric acid
  MOD_RES (10)..(10): Acylated with C16 fatty acyl group via acidic amino acid spacer
  MISC_FEATURE (15)..(20): Salt bridge
  MOD_RES (16)..(16): Xaa is AIB
  MISC_FEATURE (16)..(21): Salt bridge
  MOD_RES (29)..(29): C-terminal amidation
HSQGTFTSDKSKYLDXKRAKEFVQWLMNT

SEQ ID NO: 761-800 - skipped (40 entries)

SEQ ID NO: 801 - protein, 29 aa, Homo sapiens
HSQGTFTSDYSKYLDSRRAQDFVQWLMNT

SEQ ID NO: 802 - protein, 29 aa, Artificial Sequence
  Glucagon analogue
  MOD_RES (16)..(16): Xaa is Ser, Cys, Orn, homocysteine or acetyl phenyalanine
  MOD_RES (27)..(27): Xaa is Met, Leu or Nle
HSQGTFTSDYSKYLDXRRAQDFVQWLXDT

SEQ ID NO: 803 - protein, 29 aa, Artificial Sequence
  Glucagon analogue
  MOD_RES (17)..(17): Xaa is Arg, Cys, Orn, homocysteine or acetyl phenyalanine
  MOD_RES (27)..(27): Xaa is Met, Leu or Nle
HSQGTFTSDYSKYLDSXRAQDFVQWLXDT

SEQ ID NO: 804 - protein, 29 aa, Artificial Sequence
  Glucagon analogue
  MOD_RES (21)..(21): Xaa is Asp, Cys, Orn, homocysteine or acetyl phenylalanine
  MOD_RES (27)..(27): Xaa is Met, Leu or Nle
HSQGTFTSDYSKYLDSRRAQXFVQWLXDT

SEQ ID NO: 805 - protein, 29 aa, Artificial Sequence
  Synthetic peptide
  MOD_RES (24)..(24): Xaa is Gln, Cys, Orn, homocysteine or acetyl phenylalanine
  MOD_RES (27)..(27): Xaa is Met, Leu or Nle
HSQGTFTSDYSKYLDSRRAQDFVXWLXDT

SEQ ID NO: 806 - protein, 29 aa, Artificial Sequence
  Glucagon analogue
  MOD_RES (21)..(21): Xaa is Asp, Cys, Orn, homocysteine or acetyl phenyalanine
  MOD_RES (24)..(24): Xaa is Gln, Cys, Orn, homocysteine or acetyl phenyalanine
  MOD_RES (27)..(27): Xaa is Met, Leu or Nle
HSQGTFTSDYSKYLDSRRAQXFVXWLXDT

SEQ ID NO: 807 - protein, 29 aa, Artificial Sequence
  Glucagon analogue
  MOD_RES (27)..(27): Xaa is Met, Leu or Nle
  MOD_RES (28)..(28): Xaa is Lys, Arg, His, Asp, Glu, cysteic acid or homocysteic acid
  MOD_RES (29)..(29): Xaa is Thr, Lys, Arg, His, Asp, Glu, cysteic acid or homocysteic acid
HSQGTFTSDYSKYLDSRRAQDFVQWLXXX

SEQ ID NO: 808 - protein, 29 aa, Artificial Sequence
  Glucagon analogue
  MOD_RES (27)..(27): Xaa is Met, Leu or Nle
  MOD_RES (28)..(28): Xaa is Asp or Glu
  MOD_RES (29)..(29): Xaa is Thr, Asp or Glu
HSQGTFTSDYSKYLDSRRAQDFVQWLXXX

SEQ ID NO: 809 - protein, 29 aa, Artificial Sequence
  Glucagon analogue
  MOD_RES (27)..(27): Xaa is Met, Leu or Nle
  MOD_RES (29)..(29): Xaa is Asp or Glu
HSQGTFTSDYSKYLDSRRAQDFVQWLXNX

SEQ ID NO: 810 - protein, 29 aa, Artificial Sequence
  Synthetic peptide
  MOD_RES (27)..(27): Xaa is Met, Leu or Nle
HSQGTFTSDYSKYLDSRRAQDFVQWLXDT

SEQ ID NO: 811 - protein, 29 aa, Artificial Sequence
  Glucagon analogue
HSQGTFTSDYSKYLDSRRAQDFVQWLMDT

SEQ ID NO: 812 - protein, 29 aa, Artificial Sequence
  Glucagon analogue
  MOD_RES (29)..(29): Xaa is Lys, Arg or His
HSQGTFTSDYSKYLDSRRAQDFVQWLMNX

SEQ ID NO: 813 - protein, 29 aa, Artificial Sequence
  Glucagon analogue
HSQGTFTSDYSKYLESRRAQDFVQWLMDT

SEQ ID NO: 814 - protein, 29 aa, Artificial Sequence
  Synthetic peptide
  MOD_RES (16)..(16): Pegylation
  MOD_RES (27)..(27): Xaa is Met, Leu or Nle
HSQGTFTSDYSKYLDCRRAQDFVQWLXDT

SEQ ID NO: 815 - protein, 29 aa, Artificial Sequence
  Glucagon analogue
  MOD_RES (17)..(17): Pegylation
  MOD_RES (27)..(27): Xaa is Met, Leu or Nle
HSQGTFTSDYSKYLDSCRAQDFVQWLXDT

SEQ ID NO: 816 - protein, 29 aa, Artificial Sequence
  Glucagon analogue
  MOD_RES (21)..(21): Pegylation
  MOD_RES (27)..(27): Xaa is Met, Leu or Nle
HSQGTFTSDYSKYLDSRRAQCFVQWLXDT

SEQ ID NO: 817 - protein, 29 aa, Artificial Sequence
  Glucagon analogue
  MOD_RES (24)..(24): Pegylation
  MOD_RES (27)..(27): Xaa is Met, Leu or Nle
HSQGTFTSDYSKYLDSRRAQDFVCWLXDT

SEQ ID NO: 818 - protein, 29 aa, Artificial Sequence
  Glucagon analogue
  MOD_RES (21)..(21): Pegylation
  MOD_RES (27)..(27): Xaa is Met, Leu or Nle
HSQGTFTSDYSRYLDSRRAQKFVQWLXDT

SEQ ID NO: 819 - protein, 29 aa, Artificial Sequence
  Glucagon analogue
  MOD_RES (24)..(24): Pegylation
  MOD_RES (27)..(27): Xaa is Met, Leu or Nle
HSQGTFTSDYSRYLDSRRAQDFVKWLXDT

SEQ ID NO: 820 - protein, 10 aa, Artificial Sequence
  Synthetic peptide
  MISC_FEATURE: Peptide fragment representing carboxy terminal 10 amino acids of Exendin-4
GPSSGAPPPS

SEQ ID NO: 821 - protein, 8 aa, Artificial Sequence
  Synthetic peptide
  MISC_FEATURE: Peptide fragment representing the carboxy terminal 8 amino acids of oxyntomodulin
KRNRNNIA

SEQ ID NO: 822 - protein, 4 aa, Artificial Sequence
  Synthetic peptide
  MISC_FEATURE: Peptide fragment representing the amino 4 amino acids of oxyntomodulin carboxy terminus of SEQ ID NO: 21
KRNR

SEQ ID NO: 823 - protein, 10 aa, Artificial Sequence
  Synthetic peptide
  MISC_FEATURE: Peptide fragment representing the carboxy terminal 10 amino acids of Exendin-4
  MOD_RES (10)..(10): AMIDATION
GPSSGAPPPS

SEQ ID NO: 824 - protein, 39 aa, Artificial Sequence
  Glucagon analogue
HSQGTFTSDYSKYLDSRRAQDFVQWLMDTGPSSGAPPPS

SEQ ID NO: 825 - protein, 37 aa, Artificial Sequence
  Glucagon analogue
HSQGTFTSDYSKYLDSRRAQDFVQWLMDTKRNRNNIA

SEQ ID NO: 826 - protein, 33 aa, Artificial Sequence
  Glucagon analogue
HSQGTFTSDYSKYLDSRRAQDFVQWLMDTKRNR

SEQ ID NO: 827 - protein, 29 aa, Artificial Sequence
  Glucagon analogue
HSQGTFTSDYSKYLDSCRAQDFVQWLMNT

SEQ ID NO: 828 - protein, 39 aa, Artificial Sequence; identical to SEQ ID NO: 36
  Synthetic peptide

SEQ ID NO: 829 - protein, 29 aa, Artificial Sequence
  Glucagon analogue
  MOD_RES (24)..(24): 2-butyrolactone bound through Cys thiol group
HSQGTFTSDYSKYLDSRRAQDFVQWLMNT

SEQ ID NO: 830 - protein, 29 aa, Artificial Sequence
  Glucagon analogue
  MOD_RES (24)..(24): Carboxymethyl group bound through Cys thiol group
HSQGTFTSDYSKYLDSRRAQDFVQWLMNT

SEQ ID NO: 831 - protein, 39 aa, Artificial Sequence; identical to SEQ ID NO: 36
  Glucagon analogue

SEQ ID NO: 832 - protein, 30 aa, Artificial Sequence
  Glucagon analog
  MOD_RES (30)..(30): Xaa is Asp, Glu, Lys, Arg or His
HSQGTFTSDYSKYLDSRRAQDFVQWLMDTX

SEQ ID NO: 833 - protein, 29 aa, Artificial Sequence
  Glucagon analogue
  MOD_RES (15)..(15): Xaa is Asp, Glu, cysteic acid, homoglutamic acid or homocysteic acid
  MOD_RES (27)..(27): Xaa is Met, Leu or Nle
  MOD_RES (28)..(28): Xaa is Asn, Lys, Arg, His, Asp or Glu
  MOD_RES (29)..(29): Xaa is Thr, Lys, Arg, His, Asp or Glu
HSQGTFTSDYSKYLXSRRAQDFVQWLXXX

SEQ ID NO: 834 - protein, 29 aa, Artificial Sequence
  Glucagon analogue
  MOD_RES (15)..(15): Xaa is Asp, Glu, cysteic acid, homoglutamic acid or homocysteic acid
  MOD_RES (27)..(27): Xaa is Met, Leu or Nle
  MOD_RES (28)..(28): Xaa is Asn or an acidic amino acid
  MOD_RES (29)..(29): Xaa is Thr or an acidic amino acid
HSQGTFTSDYSKYLXSRRAQDFVQWLXXX

SEQ ID NO: 835 - protein, 39 aa, Artificial Sequence
  Synthetic peptide
HSQGTFTSDYSKYLDSRRAQDFVQWLMETGPSSGAPPPS

SEQ ID NO: 836 - protein, 37 aa, Artificial Sequence
  Glucagon analogue
HSQGTFTSDYSKYLDSRRAQDFVQWLMETKRNRNNIA

SEQ ID NO: 837 - protein, 33 aa, Artificial Sequence
  Glucagon analogue
HSQGTFTSDYSKYLDSRRAQDFVQWLMETKRNR

SEQ ID NO: 838 - protein, 29 aa, Artificial Sequence
  Glucagon analogue
HSQGTFTSDYSKYLDSRRAQDFVQWLMET

SEQ ID NO: 839 - protein, 27 aa, Artificial Sequence
  Synthetic peptide
  MOD_RES (1)..(1): Xaa is any amino acid
  MOD_RES (2)..(2): Xaa is any amino acid
  MOD_RES (27)..(27): Met comprises Z
XXQGTFTSDYSKYLDSRRAQDFVQWLM

SEQ ID NO: 840 - protein, 29 aa, Artificial Sequence
  Synthetic peptide
  MOD_RES (1)..(1): Xaa is alpha, alpha-dimethyl imidiazole acetic acid (DMIA)
  MISC_FEATURE (16)..(20): Lactam bridge between residues 16 and 20
  MOD_RES (24)..(24): Pegylation
XSQGTFTSDYSKYLDERRAKDFVCWLMNT

SEQ ID NO: 841 - protein, 29 aa, Artificial Sequence
  Synthetic peptide
  MOD_RES (1)..(1): Xaa is alpha, alpha-dimethyl imidiazole acetic acid (DMIA)
  MISC_FEATURE (16)..(20): Lactam bridge between residues 16 and 20
  MOD_RES (24)..(24): Glutamine to alanine mutation
  MOD_RES (29)..(29): Pegylation
XSQGTFTSDYSKYLDERRAKDFVAWLMNC

SEQ ID NO: 842 - protein, 29 aa, Artificial Sequence
  Synthetic peptide
  MOD_RES (1)..(1): Xaa is alpha, alpha-dimethyl imidiazole acetic acid (DMIA)
  MISC_FEATURE (16)..(20): Lactam bridge between residues 16 and 20
  MOD_RES (24)..(24): Pegylation
  MOD_RES (27)..(27): Xaa is Nle or Leu
XSQGTFTSDYSKYLDERRAKDFVCWLXNT

SEQ ID NO: 843 - protein, 29 aa, Artificial Sequence
  Synthetic peptide
  MOD_RES (1)..(1): Xaa is alpha, alpha-dimethyl imidiazole acetic acid (DMIA)
  MISC_FEATURE (16)..(20): Lactam bridge between residues 16 and 20
  MISC_FEATURE (24)..(24): Glutamine to alanine mutation
  MISC_FEATURE (27)..(27): Xaa is Nle or Leu
  MOD_RES (29)..(29): Pegylation
XSQGTFTSDYSKYLDERRAKDFVAWLXNC

SEQ ID NO: 844 - protein, 29 aa, Artificial Sequence
  Synthetic peptide
  MISC_FEATURE: SEQ ID NO: 1 with  Ala 20, Ala 24, Nle 27, and Asp 28
  MOD_RES (27)..(27): Xaa is Nle
HSQGTFTSDYSKYLDSRRAADFVAWLXDT

SEQ ID NO: 845 - protein, 29 aa, Artificial Sequence
  Synthetic peptide
  MISC_FEATURE: SEQ ID NO: 1 with Ala 20, Ala 24, Nle27 , Asp 28, and Glu 29
  MOD_RES (27)..(27): Xaa is Nle
HSQGTFTSDYSKYLDSRRAADFVAWLXDE

SEQ ID NO: 846 - protein, 30 aa, Artificial Sequence
  Synthetic peptide
  MISC_FEATURE: SEQ ID NO: 1 with Ala 20, Ala 24, Nle 27, Asp 28, and Glu 30
  MOD_RES (27)..(27): Xaa is Nle
HSQGTFTSDYSKYLDSRRAADFVAWLXDTE

SEQ ID NO: 847 - protein, 29 aa, Artificial Sequence
  Synthetic peptide
  MISC_FEATURE: SEQ ID NO: 1 with Ala 20, Ala 24, Nle 27, Glu 28, and Glu 29
  MOD_RES (27)..(27): Xaa is Nle
HSQGTFTSDYSKYLDSRRAADFVAWLXEE

SEQ ID NO: 848 - protein, 30 aa, Artificial Sequence
  Synthetic peptide
  MISC_FEATURE: SEQ ID NO: 1 with Ala 20, Ala 24, Nle 27, Glu 28, and Glu 30
  MOD_RES (27)..(27): Xaa is Nle
HSQGTFTSDYSKYLDSRRAADFVAWLXETE

SEQ ID NO: 849 - protein, 30 aa, Artificial Sequence
  Synthetic peptide
  MOD_RES (27)..(27): Xaa is Nle
  MISC_FEATURE (27)..(27): SEQ ID NO: 1 with Ala 20, Ala 24, Nle 27, Glu 29, and Glu 30
HSQGTFTSDYSKYLDSRRAADFVAWLXNEE

SEQ ID NO: 850 - protein, 29 aa, Artificial Sequence
  Synthetic peptide
  MISC_FEATURE: SEQ ID NO: 1 with Ala 20, Glu 21, Ala 24, Nle 27, and Asp 28
  MOD_RES (27)..(27): Xaa is Nle
HSQGTFTSDYSKYLDSRRAAEFVAWLXDT

SEQ ID NO: 851 - protein, 29 aa, Artificial Sequence
  Synthetic peptide
  MISC_FEATURE: SEQ ID NO: 1 with Ala 20, Glu 21, Ala 24, Nle 27, Asp 28, and Glu 29
  MOD_RES (27)..(27): Xaa is Nle
HSQGTFTSDYSKYLDSRRAAEFVAWLXDE

SEQ ID NO: 852 - protein, 29 aa, Artificial Sequence
  Synthetic peptide
  MISC_FEATURE: SEQ ID NO: 1 with Ala 20, Glu 21, Ala 24, Nle 27, Asp 28, and Glu 30
  MOD_RES (27)..(27): Xaa is Nle
HSQGTFTSDYSKYLDSRRAAEFVAWLXDE

SEQ ID NO: 853 - protein, 29 aa, Artificial Sequence
  Synthetic peptide
  MISC_FEATURE: SEQ ID NO :1 with Ala 20, Glu 21, Ala 24, Nle 27, Glu 28, and Glu 29
  MOD_RES (27)..(27): Xaa is Nle
HSQGTFTSDYSKYLDSRRAAEFVAWLXEE

SEQ ID NO: 854 - protein, 29 aa, Artificial Sequence
  Synthetic peptide
  MISC_FEATURE: SEQ ID NO: 1 with Ala 20, Glu 21, Ala 24, Nle 27, Glu 28, and Glu 30
HSQGTFTSDYSKYLDSRRAQDFVQWLMNT

SEQ ID NO: 855 - protein, 30 aa, Artificial Sequence
  Synthetic peptide
  MISC_FEATURE: SEQ ID NO: 1 with Ala 20, Glu 21, Ala 24, Nle 27, Glu 29, and Glu 30
  MOD_RES (27)..(27): Xaa is Nle
HSQGTFTSDYSKYLDSRRAAEFVAWLXNEE

SEQ ID NO: 856 - protein, 29 aa, Artificial Sequence
  Synthetic peptide
  MISC_FEATURE: SEQ ID NO: 1 with Thr 16, Ala 20, Glu 21, Ala 24, Nle 27, Asp 28, and Glu29
  MOD_RES (27)..(27): Xaa is Nle
HSQGTFTSDYSKYLDTRRAAEFVAWLXDE

SEQ ID NO: 857 - protein, 31 aa, Homo sapiens; identical to SEQ ID NO: 50

SEQ ID NO: 858 - protein, 30 aa, Homo sapiens; identical to SEQ ID NO: 52
  MOD_RES (30)..(30): AMIDATION

SEQ ID NO: 859 - protein, 29 aa, Artificial Sequence
  Synthetic peptide
  MOD_RES (3)..(3): Xaa is Glutamine analog
  MOD_RES (27)..(27): Xaa is Nle
HSXGTFTSDYSKYLDTRRAAEFVAWLXDE

SEQ ID NO: 860 - protein, 29 aa, Artificial Sequence
  Synthetic peptide
  MOD_RES (3)..(3): Xaa is Glutamine analog
  MOD_RES (16)..(16): Xaa is Aminoisobutryic acid
HSXGTFTSDYSKYLDXRRAADFVAWLMDE

SEQ ID NO: 861 - protein, 29 aa, Artificial Sequence
  Synthetic peptide
  MOD_RES (27)..(27): Xaa is Nle
HSQGTFTSDYSKYLDTRRAAEFVAWLXDE

SEQ ID NO: 862 - protein, 29 aa, Artificial Sequence
  Synthetic peptide
  MOD_RES (3)..(3): Xaa is Acetamidomethyl-cysteine
  MOD_RES (27)..(27): Xaa is Nle
HSXGTFTSDYSKYLDTRRAAEFVAWLXDE

SEQ ID NO: 863 - protein, 29 aa, Artificial Sequence
  Synethic peptide
  MOD_RES (3)..(3): Xaa is Acetyldiaminobutanoic acid
  MOD_RES (27)..(27): Xaa is Nle
HSXGTFTSDYSKYLDTRRAAEFVAWLXDE

SEQ ID NO: 864 - protein, 29 aa, Artificial Sequence
  Synthetic peptide
  MOD_RES (3)..(3): Xaa is Carbamoyldiaminopropanoic acid
  MOD_RES (27)..(27): Xaa is Nle
HSXGTFTSDYSKYLDTRRAAEFVAWLXDE

SEQ ID NO: 865 - protein, 29 aa, Artificial Sequence
  Synthetic peptide
  MOD_RES (3)..(3): Xaa is Methylglutamine
  MOD_RES (27)..(27): Xaa is Nle
HSXGTFTSDYSKYLDTRRAAEFVAWLXDE

SEQ ID NO: 866 - protein, 29 aa, Artificial Sequence
  Synthetic peptide
  MOD_RES (3)..(3): Xaa is Methionine sulfoxide
  MOD_RES (27)..(27): Xaa is Nle
HSXGTFTSDYSKYLDTRRAAEFVAWLXDE

SEQ ID NO: 867 - protein, 29 aa, Artificial Sequence
  Synthetic peptide
  MOD_RES (3)..(3): Xaa is Acetylornithine
  MOD_RES (27)..(27): Xaa is Nle
HSXGTFTSDYSKYLDTRRAAEFVAWLXDE

SEQ ID NO: 868 - protein, 29 aa, Artificial Sequence
  Synthetic peptide
  MOD_RES (16)..(16): Xaa is Aminoisobutryic acid
HSQGTFTSDYSKYLDXRRAADFVAWLMDE

SEQ ID NO: 869 - protein, 29 aa, Artificial Sequence
  Synthetic peptide
  MOD_RES (3)..(3): Xaa is Acetyldiaminobutanoic acid
  MOD_RES (16)..(16): Xaa is Aminoisobutryic acid
HSXGTFTSDYSKYLDXRRAADFVAWLMDE

SEQ ID NO: 870 - protein, 29 aa, Artificial Sequence
  Synthetic peptide
  MOD_RES (3)..(3): Xaa is Methylglutamine
  MOD_RES (16)..(16): Xaa is Aib
HSXGTFTSDYSKYLDXRRAADFVAWLMDE

SEQ ID NO: 871 - protein, 29 aa, Artificial Sequence
  Synthetic peptide
  MOD_RES (3)..(3): Xaa is acetyldiaminobutanoic acid
  MOD_RES (16)..(16): Xaa is Aib
HSXGTFTSDYSKYLDXRRAADFVAWLLDE

SEQ ID NO: 872 - protein, 39 aa, Artificial Sequence; identical to SEQ ID NO: 604
  Synthetic peptide
  MOD_RES (3)..(3): Xaa is Acetyldiaminobutanoic acid
  MOD_RES (16)..(16): Aminoisobutryic Acid
  MOD_RES (39)..(39): AMIDATION

SEQ ID NO: 873 - protein, 29 aa, Artificial Sequence
  Synthetic peptide
  MOD_RES (3)..(3): Xaa is Acetyldiaminobutanoic acid
  MOD_RES (16)..(16): Xaa is Aminoisobutryric acid
HSXGTFTSDYSKYLDXRRASDFVSWLLDE

SEQ ID NO: 874 - protein, 29 aa, Artificial Sequence
  Synthetic peptide
  MOD_RES (3)..(3): Xaa is Acetyldiaminobutanoic acid
  MOD_RES (16)..(16): Xaa is Aminoisobutryic acid
HSXGTFTSDYSKYLDXRRATDFVTWLLDE

SEQ ID NO: 875 - protein, 29 aa, Artificial Sequence
  Synthetic peptide
HSQGTFTSDYSKYLDSRRAQDFVQWLMDE

SEQ ID NO: 876 - protein, 29 aa, Artificial Sequence
  Synthetic peptide
  MOD_RES (16)..(16): Xaa is Aib
HSQGTFTSDYSKYLDXRRAQDFVQWLMDE

SEQ ID NO: 877 - protein, 29 aa, Artificial Sequence
  Synthetic peptide
  misc_feature (3)..(3): Xaa can be any naturally occurring amino acid
HSXGTFTSDYSKYLDSRRAQDFVQWLMNT

SEQ ID NO: 878 - protein, 29 aa, Artificial Sequence
  Synthetic peptide
HSQGTFTSDYSKYLDSRRAQDFVQWLMDT

SEQ ID NO: 879 - protein, 30 aa, Artificial Sequence; identical to SEQ ID NO: 581
  Synthetic peptide
  MOD_RES (2)..(2): Xaa is d-Ser
  MOD_RES (30)..(30): Acylated with a C14 fatty acyl group
  MOD_RES (30)..(30): AMIDATION

SEQ ID NO: 880 - protein, 29 aa, Artificial Sequence
  Synthetic peptide
  MOD_RES (2)..(2): Xaa is d-Ser
  MOD_RES (10)..(10): Acylated with a C14 fatty acyl group
  MOD_RES (29)..(29): AMIDATION
HXQGTFTSDKSKYLDERRAKDFVQWLMNT

SEQ ID NO: 881 - protein, 30 aa, Artificial Sequence; identical to SEQ ID NO: 581
  Synthetic peptide
  MOD_RES (2)..(2): Xaa is d-Ser
  MOD_RES (30)..(30): Acylated with a C16 fatty acyl group
  MOD_RES (30)..(30): AMIDATION

SEQ ID NO: 882 - protein, 29 aa, Artificial Sequence
  Synthetic peptide
  MOD_RES (2)..(2): Xaa is d-Ser
  MOD_RES (10)..(10): Acylated with a C16 fatty acyl group
  MOD_RES (29)..(29): AMIDATION
HXQGTFTSDKSKYLDERRAKDFVQWLMNT

SEQ ID NO: 883 - protein, 29 aa, Artificial Sequence
  Synthetic peptide
  MOD_RES (2)..(2): Aminoisobutryic Acid
  MOD_RES (10)..(10): Acylated with a C18 fatty acyl group
  MOD_RES (24)..(24): Cys-PEG
  MOD_RES (29)..(29): AMIDATION
HXQGTFTSDKSKYLDEQAAKEFICWLMNT

SEQ ID NO: 884 - protein, 30 aa, Artificial Sequence; identical to SEQ ID NO: 586
  Synthetic peptide
  MOD_RES (2)..(2): Aminoisobutryic Acid
  MOD_RES (24)..(24): Cys-PEG
  MOD_RES (30)..(30): Acylated with a C18 fatty acyl group
  MOD_RES (30)..(30): AMIDATION

SEQ ID NO: 885 - protein, 29 aa, Artificial sequence
  Synthetic peptide
  MOD_RES (16)..(16): Xaa is Ser or alpha, alpha-disubstituted amino acid
  MOD_RES (20)..(20): Xaa is Gln or alpha, alpha-disubstituted amino acid
  MOD_RES (21)..(21): Xaa is Asp or alpha, alpha-disubstituted amino acid
  MOD_RES (24)..(24): Xaa is Gln or alpha, alpha-disubstituted amino acid
HSQGTFTSDYSKYLDXRRAXXFVXWLMNT

SEQ ID NO: 886 - protein, 29 aa, Artificial Sequence
  Synthetic peptide
  MOD_RES (16)..(16): Xaa is Aib
HSQGTFTSDYSKYLDXRRAQDFVQWLMNT

SEQ ID NO: 887 - protein, 29 aa, Artificial Sequence
  Synthetic peptide
  MOD_RES (19)..(19): Xaa is Aib
HSQGTFTSDYSKYLDSRRXQDFVQWLMNT

SEQ ID NO: 888 - protein, 29 aa, Artificial Sequence
  Synthetic peptide
  MOD_RES (20)..(20): Xaa is Aib
HSQGTFTSDYSKYLDSRRAXDFVQWLMNT

SEQ ID NO: 889 - protein, 29 aa, Artificial Sequence
  Synthetic peptide
  MOD_RES (21)..(21): Xaa is Aib
HSQGTFTSDYSKYLDSRRAQXFVQWLMNT

SEQ ID NO: 890 - protein, 29 aa, Artificial Sequence
  Synthetic peptide
  MOD_RES (24)..(24): Xaa is Aib
HSQGTFTSDYSKYLDSRRAQDFVXWLMNT

SEQ ID NO: 891 - protein, 29 aa, Artificial Sequence
  Synthetic peptide
  MOD_RES (16)..(16): Xaa is Aib
  MOD_RES (20)..(20): Xaa is Aib
HSQGTFTSDYSKYLDXRRAXDFVQWLMNT

SEQ ID NO: 892 - protein, 29 aa, Artificial Sequence
  Synthetic peptide
  MOD_RES (16)..(16): Xaa is Aib
  MOD_RES (24)..(24): Xaa is Aib
HSQGTFTSDYSKYLDXRRAQDFVXWLMNT

SEQ ID NO: 893 - protein, 29 aa, Artificial Sequence
  Synthetic peptide
  MOD_RES (20)..(20): Xaa is Aib
  MOD_RES (24)..(24): Xaa is Aib
HSQGTFTSDYSKYLDSRRAXDFVXWLMNT

SEQ ID NO: 894 - protein, 29 aa, Artificial Sequence
  Synthetic peptide
  MOD_RES (16)..(16): Xaa is Aib
  MOD_RES (20)..(20): Xaa is Aib
  MOD_RES (24)..(24): Xaa is Aib
HSQGTFTSDYSKYLDXRRAXDFVXWLMNT

SEQ ID NO: 895 - protein, 29 aa, Artificial Sequence
  Synthetic peptide
  MOD_RES (2)..(2): Xaa is Aib
  MOD_RES (16)..(16): Xaa is Aib
  MOD_RES (29)..(29): AMIDATION
HXQGTFTSDKSKYLDXRRAQDFVQWLMNT

SEQ ID NO: 896 - protein, 29 aa, Artificial Sequence
  Synthetic peptide
  MOD_RES (2)..(2): Xaa is Aib
  MOD_RES (16)..(16): Xaa is Aib
  MOD_RES (29)..(29): AMIDATION
HXQGTFTSDYSKYLDXRRAQDFVQWLMNT

SEQ ID NO: 897 - protein, 29 aa, Artificial Sequence
  Synthetic peptide
  MOD_RES (2)..(2): Xaa is Aib
  MOD_RES (10)..(10): Acylated with a C16 fatty acyl group
  MOD_RES (16)..(16): Xaa is Aib
  MOD_RES (29)..(29): AMIDATION
HXQGTFTSDKSKYLDXRRAQDFVQWLMNT

SEQ ID NO: 898 - protein, 29 aa, Artificial Sequence
  Synthetic peptide
  MOD_RES (2)..(2): Xaa is Aib
  MOD_RES (10)..(10): Acylated with a C16 fatty acyl group via Ala-Ala spacer
  MOD_RES (16)..(16): Xaa is Aib
  MOD_RES (29)..(29): AMIDATION
HXQGTFTSDKSKYLDXRRAQDFVQWLMNT

SEQ ID NO: 899 - protein, 29 aa, Artificial Sequence
  Synthetic peptide
  MOD_RES (2)..(2): Xaa is Aib
  MOD_RES (10)..(10): Acylated with a C16 fatty acyl group via dipeptide spacer
  MOD_RES (16)..(16): Xaa is Aib
  MOD_RES (29)..(29): AMIDATION
HXQGTFTSDKSKYLDXRRAQDFVQWLMNT

SEQ ID NO: 900 - protein, 29 aa, Artificial Sequence
  Synthetic peptide
  MOD_RES (2)..(2): Xaa is Aib
  MOD_RES (10)..(10): Acylated with a C16 fatty acyl group via beta-Ala-beta-Ala spacer
  MOD_RES (16)..(16): Xaa is Aib
  MOD_RES (29)..(29): AMIDATION
HXQGTFTSDKSKYLDXRRAQDFVQWLMNT

SEQ ID NO: 901 - protein, 29 aa, Artificial Sequence
  Synthetic peptide
  MOD_RES (2)..(2): Xaa is Aib
  MOD_RES (10)..(10): Acylated with a C16 fatty acyl group via 6-aminohexanoic acid spacer
  MOD_RES (16)..(16): Xaa is Aib
  MOD_RES (29)..(29): AMIDATION
HXQGTFTSDKSKYLDXRRAQDFVQWLMNT

SEQ ID NO: 902 - protein, 29 aa, Artificial Sequence
  Synthetic peptide
  MOD_RES (2)..(2): Xaa is Aib
  MOD_RES (10)..(10): Acylated with a C16 fatty acyl group via Leu-Leu spacer
  MOD_RES (16)..(16): Xaa is Aib
  MOD_RES (29)..(29): AMIDATION
HXQGTFTSDKSKYLDXRRAQDFVQWLMNT

SEQ ID NO: 903 - protein, 29 aa, Artificial Sequence
  Synthetic peptide
  MOD_RES (2)..(2): Xaa is Aib
  MOD_RES (10)..(10): Acylated with a C16 fatty acyl group via Pro-Pro spacer
  MOD_RES (16)..(16): Xaa is Aib
  MOD_RES (29)..(29): AMIDATION
HXQGTFTSDKSKYLDXRRAQDFVQWLMNT

SEQ ID NO: 904 - protein, 29 aa, Artificial Sequence
  Synthetic peptide
  MOD_RES (2)..(2): Xaa is Aib
  MOD_RES (10)..(10): Acylated with a C14 fatty acyl group
  MOD_RES (16)..(16): Xaa is Aib
  MOD_RES (24)..(24): Cys-PEG
  MOD_RES (29)..(29): AMIDATION
HXQGTFTSDKSKYLDXRRAQDFVCWLMNT

SEQ ID NO: 905 - protein, 29 aa, Artificial Sequence
  Synthetic peptide
  MOD_RES (2)..(2): Xaa is Aib
  MOD_RES (10)..(10): Acylated with a C14 fatty acyl group via dipeptide spacer
  MOD_RES (16)..(16): Xaa is Aib
  MOD_RES (24)..(24): Cys-PEG
  MOD_RES (29)..(29): AMIDATION
HXQGTFTSDKSKYLDXRRAQDFVCWLMNT

SEQ ID NO: 906 - protein, 29 aa, Artificial Sequence
  Synthetic peptide
  MOD_RES (2)..(2): Xaa is Aib
  MOD_RES (10)..(10): Acylated with a C14 fatty acyl group via dipeptide spacer
  MOD_RES (16)..(16): Xaa is Aib
  MOD_RES (29)..(29): AMIDATION
HXQGTFTSDKSKYLDXRRAQDFVQWLMNT

SEQ ID NO: 907 - protein, 29 aa, Artificial Sequence
  Synthetic peptide
  MOD_RES (2)..(2): Xaa is Aib
  MOD_RES (10)..(10): Acylated with a C14 fatty acyl group via Ala-Ala spacer
  MOD_RES (16)..(16): Xaa is Aib
  MOD_RES (24)..(24): Cys-PEG
  MOD_RES (29)..(29): AMIDATION
HXQGTFTSDKSKYLDXRRAQDFVCWLMNT

SEQ ID NO: 908 - protein, 29 aa, Artificial Sequence
  Synthetic peptide
  MOD_RES (2)..(2): Xaa is Aib
  MOD_RES (10)..(10): Acylated with a C14 fatty acyl group via Ala-Ala spacer
  MOD_RES (16)..(16): Xaa is Aib
  MOD_RES (29)..(29): AMIDATION
HXQGTFTSDKSKYLDXRRAQDFVQWLMNT

SEQ ID NO: 909 - protein, 29 aa, Artificial Sequence
  Synthetic peptide
  MOD_RES (2)..(2): Xaa is Aib
  MOD_RES (10)..(10): Acylated with a C16 fatty acyl group via Ala-Ala spacer
  MOD_RES (16)..(16): Xaa is Aib
  MOD_RES (24)..(24): Cys-PEG
  MOD_RES (29)..(29): AMIDATION
HXQGTFTSDKSKYLDXRRAQDFVCWLMNT

SEQ ID NO: 910 - protein, 29 aa, Artificial Sequence
  Synthetic peptide
  MOD_RES (2)..(2): Xaa is Aib
  MOD_RES (10)..(10): Acylated with a C16 fatty acyl group via dipeptide spacer
  MOD_RES (16)..(16): Xaa is Aib
  MOD_RES (24)..(24): Cys-PEG
  MOD_RES (29)..(29): AMIDATION
HXQGTFTSDKSKYLDXRRAQDFVCWLMNT

SEQ ID NO: 911 - protein, 29 aa, Artificial Sequence
  Synthetic peptide
  MOD_RES (2)..(2): Xaa is Aib
  MOD_RES (10)..(10): Covalently bound to a C14 fatty acyl group
  MOD_RES (16)..(16): Xaa is Aib
  MOD_RES (29)..(29): AMIDATION
HXQGTFTSDKSKYLDXRRAQDFVCWLMNT

SEQ ID NO: 912 - protein, 29 aa, Artificial Sequence
  Synthetic peptide
  MOD_RES (2)..(2): Xaa is Aib
  MOD_RES (10)..(10): Covalently bound to C14 fatty acyl group via dipeptide spacer
  MOD_RES (16)..(16): Xaa is Aib
  MOD_RES (29)..(29): AMIDATION
HXQGTFTSDKSKYLDXRRAQDFVCWLMNT

SEQ ID NO: 913 - protein, 29 aa, Artificial Sequence
  Synthetic peptide
  MOD_RES (2)..(2): Xaa is Aib
  MOD_RES (10)..(10): Covalently bound to C14 fatty acyl group via Ala-Ala spacer
  MOD_RES (16)..(16): Xaa is Aib
  MOD_RES (29)..(29): AMIDATION
HXQGTFTSDKSKYLDXRRAQDFVCWLMNT

SEQ ID NO: 914 - protein, 29 aa, Artificial Sequence
  Synthetic peptide
  MOD_RES (2)..(2): Xaa is Aib
  MOD_RES (10)..(10): Covalently bound to C16 fatty acyl group via dipeptide spacer
  MOD_RES (16)..(16): Xaa is Aib
  MOD_RES (29)..(29): AMIDATION
HXQGTFTSDKSKYLDXRRAQDFVCWLMNT

SEQ ID NO: 915 - protein, 29 aa, Artificial Sequence
  Synthetic peptide
  MOD_RES (2)..(2): Xaa is Aib
  MOD_RES (10)..(10): Covelently bound to C16 fatty acyl group via Ala-Ala spacer
  MOD_RES (16)..(16): Xaa is Aib
  MOD_RES (29)..(29): AMIDATION
HXQGTFTSDKSKYLDXRRAQDFVCWLMNT

SEQ ID NO: 916 - protein, 30 aa, Artificial Sequence; identical to SEQ ID NO: 581
  Synthetic peptide
  MOD_RES (2)..(2): D-serine, D-alanine, valine, amino n-butyric acid, glycine, N-methyl serine, aminoisobutyric acid
  MOD_RES (30)..(30): Acylated with a C14 fatty acyl group
  MOD_RES (30)..(30): AMIDATION

SEQ ID NO: 917 - protein, 29 aa, Artificial Sequence
  Synthetic peptide
  MOD_RES (2)..(2): D-serine, D-alanine, valine, amino n-butyric acid, glycine, N-methyl serine, aminoisobutyric acid
  MOD_RES (10)..(10): Acylated with a C14 fatty acyl group
  MOD_RES (29)..(29): AMIDATION
HXQGTFTSDKSKYLDERRAKDFVQWLMNT

SEQ ID NO: 918 - protein, 30 aa, Artificial Sequence; identical to SEQ ID NO: 581
  Synthetic peptide
  MOD_RES (2)..(2): D-serine, D-alanine, valine, amino n-butyric acid, glycine, N-methyl serine, aminoisobutyric acid
  MOD_RES (30)..(30): Acylated with a C16 fatty acyl group
  MOD_RES (30)..(30): AMIDATION

SEQ ID NO: 919 - protein, 29 aa, Artificial Sequence
  Synthetic peptide
  MOD_RES (2)..(2): D-serine, D-alanine, valine, amino n-butyric acid, glycine, N-methyl serine, aminoisobutyric acid
  MOD_RES (10)..(10): Acylated with a C16 fatty acyl group
  MOD_RES (29)..(29): AMIDATION
HXQGTFTSDKSKYLDERRAKDFVQWLMNT

SEQ ID NO: 920-1000 - skipped (81 entries)

SEQ ID NO: 1001 - protein, 29 aa, Homo sapiens
  MISC_FEATURE: Wild type glucagon
HSQGTFTSDYSKYLDSRRAQDFVQWLMNT

SEQ ID NO: 1002 - protein, 31 aa, Homo sapiens; identical to SEQ ID NO: 50
  MISC_FEATURE (1)..(31): GLP-1(7-37)

SEQ ID NO: 1003 - protein, 30 aa, Artificial sequence; identical to SEQ ID NO: 52
  Synthetic polypeptide
  MISC_FEATURE (1)..(30): GLP-1(7-36) amidated
  MISC_FEATURE (30)..(30): C-terminal amidation

SEQ ID NO: 1004 - protein, 42 aa, Homo sapiens
  mat_peptide (1)..(42): gastric inhibitory polypeptide
YAEGTFISDYSIAMDKIHQQDFVNWLLAQKGKKNDWKHNITQ

SEQ ID NO: 1005 - protein, 29 aa, Artificial sequence
  Synthetic polypeptide
  MISC_FEATURE: Analog 61
  MISC_FEATURE (16)..(20): Lactam bridge between residues 16 and 20.
HSQGTFTSDYSKYLDEIHQKEFIAWLMNT

SEQ ID NO: 1006 - protein, 29 aa, Artificial sequence
  Synthetic polypeptide
  MISC_FEATURE: Analog 62
  MISC_FEATURE (16)..(20): Lactam bridge between residues 16 and 20.
HSQGTFTSDYSIYLDEIHQKEFIAWLMNT

SEQ ID NO: 1007 - protein, 29 aa, Artificial sequence
  Synthetic polypeptide
  MISC_FEATURE: Analog 63
  MISC_FEATURE (12)..(16): Lactam bridge between residues 12 and 16.
HSQGTFTSDYSKYLDEIHQKEFIAWLMNT

SEQ ID NO: 1008 - protein, 29 aa, Artificial sequence
  Synthetic polypeptide
  MISC_FEATURE: Analog 66
HSQGTFTSDYSKYLDEIHQKEFIAWLLAQ

SEQ ID NO: 1009 - protein, 29 aa, Artificial sequence
  Synthetic polypeptide
  MISC_FEATURE: Analog 68
HSQGTFTSDYSKYLDKIHQEEFIAWLMNT

SEQ ID NO: 1010 - protein, 29 aa, Artificial sequence
  Synthetic polypeptide
  MISC_FEATURE: Analog 69
  MISC_FEATURE (16)..(20): Lactam bridge between residues 16 and 20
HSQGTFTSDYSKYLDKIHQEEFIAWLMNT

SEQ ID NO: 1011 - protein, 29 aa, Artificial sequence
  Synthetic polypeptide
  MISC_FEATURE: Analog 84
  MISC_FEATURE (16)..(20): Lactam bridge between residues 16 and 20
HSQGTFTSDYSIYLDEIHQKEFICWLLAQ

SEQ ID NO: 1012 - protein, 29 aa, Artificial sequence
  Synthetic polypeptide
  MISC_FEATURE: Analog 85
  MISC_FEATURE (16)..(20): Lactam bridge between residues 16 and 20
  MISC_FEATURE (24)..(24): PEG (20kDa) covalently attached to Cysteine
HSQGTFTSDYSIYLDEIHQKEFICWLLAQ

SEQ ID NO: 1013 - protein, 29 aa, Artificial sequence
  Synthetic polypeptide
  MISC_FEATURE: Analog 92
HSQGTFTSDYSIYLDEKHQKEFIAWLLAQ

SEQ ID NO: 1014 - protein, 29 aa, Artificial sequence
  Synthetic polypeptide
  MISC_FEATURE: Analog 93
  MISC_FEATURE (16)..(20): Lactam bridge between residues 16 and 20
  MISC_FEATURE (17)..(21): Lactam bridge between residues 17 and 21
HSQGTFTSDYSIYLDEKHQKEFIAWLLAQ

SEQ ID NO: 1015 - protein, 29 aa, Artificial sequence
  Synthetic polypeptide
  MISC_FEATURE: Analog 95
  MISC_FEATURE (16)..(20): Lactam bridge between residues 16 and 20
HAEGTFISDYSIAMDEIHQKDFVNWLLAQ

SEQ ID NO: 1016 - protein, 29 aa, Artificial sequence
  Synthetic polypeptide
  MISC_FEATURE: Analog 96
  MISC_FEATURE (16)..(20): Lactam bridge between residues 16 and 20
YAEGTFISDYSIAMDEIHQKDFVNWLLAQ

SEQ ID NO: 1017 - protein, 29 aa, Artificial sequence
  Synthetic polypeptide
  MISC_FEATURE: Analog 97
  MISC_FEATURE (16)..(20): Lactam bridge between residues 16 and 20
HAEGTFTSDYSIYMDEIHQKDFVNWLLAQ

SEQ ID NO: 1018 - protein, 29 aa, Artificial sequence
  Synthetic polypeptide
  MISC_FEATURE: Analog 98
  MISC_FEATURE (16)..(20): Lactam bridge between residues 16 and 20
YAEGTFTSDYSIYMDEIHQKDFVNWLLAQ

SEQ ID NO: 1019 - protein, 42 aa, Artificial sequence
  Synthetic polypeptide
  MISC_FEATURE: Analog 99
YAEGTFISDYSIAMDKIHQQDFVNWLLAQKGKKNWLKHNITQ

SEQ ID NO: 1020 - protein, 42 aa, Artificial sequence
  Synthetic polypeptide
  MISC_FEATURE: Analog 100
  MOD_RES (2)..(2): Xaa is Aib
YXEGTFISDYSIAMDKIHQQDFVNWLLAQKGKKNWLKHNITQ

SEQ ID NO: 1021 - protein, 42 aa, Artificial sequence
  Synthetic polypeptide
  MISC_FEATURE: Analog 101
YAPGTFISDYSIAMDKIHQQDFVNWLLAQKGKKNWLKHNITQ

SEQ ID NO: 1022 - protein, 42 aa, Artificial sequence
  Synthetic polypeptide
  MISC_FEATURE: Analog 102
  MOD_RES (2)..(2): Xaa is Aib
YXEGTFISDYSIAMDKIHQQDFVCWLLAQKGKKNWLKHNITQ

SEQ ID NO: 1023 - protein, 42 aa, Artificial sequence
  Synthetic polypeptide
  MISC_FEATURE: Analog 104
YAPGTFISDYSIAMDKIHQQDFVCWLLAQKGKKNWLKHNITQ

SEQ ID NO: 1024 - protein, 42 aa, Artificial sequence; identical to SEQ ID NO: 1023
  Synthetic polypeptide
  MISC_FEATURE: Analog 105
  MISC_FEATURE (24)..(24): PEG (40kDa) attached to Cysteine

SEQ ID NO: 1025 - protein, 29 aa, Artificial sequence
  Synthetic polypeptide
  MISC_FEATURE: Analog 106
YAEGTFISDYSIAMDKIHQQDFVNWLLAQ

SEQ ID NO: 1026 - protein, 29 aa, Artificial sequence
  Synthetic polypeptide
  MISC_FEATURE: Analog 107
  MISC_FEATURE (16)..(20): Lactam bridge between residues 16 and 20
HSQGTFISDYSKYLDEIHQKEFIAWLMNT

SEQ ID NO: 1027 - protein, 29 aa, Artificial sequence
  Synthetic polypeptide
  MISC_FEATURE: Analog 108
  MISC_FEATURE (16)..(20): Lactam bridge between residues 16 and 20
HSQGTFISDYSKALDEIHQKEFIAWLMNT

SEQ ID NO: 1028 - protein, 29 aa, Artificial sequence
  Synthetic polypeptide
  MISC_FEATURE: Analog 109
  MISC_FEATURE (16)..(20): Lactam bridge between residues 16 and 20
YSQGTFTSDYSKYLDEIHQKDFVNWLLAQ

SEQ ID NO: 1029 - protein, 29 aa, Artificial sequence
  Synthetic polypeptide
  MISC_FEATURE: Analog 110
  MISC_FEATURE (16)..(20): Lactam bridge between residues 16 and 20
YSQGTFTSDYSIYLDEIHQKDFVNWLLAQ

SEQ ID NO: 1030 - protein, 29 aa, Artificial sequence
  Synthetic polypeptide
  MISC_FEATURE: Analog 111
  MISC_FEATURE (16)..(20): Lactam bridge between residues 16 and 20
HSQGTFTSDYSKYLDEIHQKDFVNWLLAQ

SEQ ID NO: 1031 - protein, 24 aa, Artificial sequence
  Synthetic polypeptide
  MISC_FEATURE: Analog 113
  MOD_RES (1)..(1): Xaa is 3-phenyllactic acid
  MISC_FEATURE (11)..(15): Lactam bridge between residues 11 and 15
XISDYSIAMDEIHQKDFVNWLLAQ

SEQ ID NO: 1032 - protein, 24 aa, Artificial sequence
  Synthetic polypeptide
  MISC_FEATURE: Analog 114
  MOD_RES (1)..(1): Xaa is 3-phenyllactic acid
  MISC_FEATURE (11)..(15): Lactam bridge between residues 11 and 15
XTSDYSKYLDEIHQKDFVNWLLAQ

SEQ ID NO: 1033 - protein, 39 aa, Artificial sequence
  Synthetic polypeptide
  MISC_FEATURE: Analog 115
  MISC_FEATURE (16)..(20): Lactam bridge between residues 16 and 20
HSQGTFTSDYSKYLDEIHQKDFVNWLLAGGPSSGAPPPS

SEQ ID NO: 1034 - protein, 39 aa, Artificial sequence
  Synthetic polypeptide
  MISC_FEATURE: Analog 116
  MISC_FEATURE (16)..(20): Lactam bridge between residues 16 and 20
YSQGTFTSDYSKYLDEIHQKDFVNWLLAGGPSSGAPPPS

SEQ ID NO: 1035 - protein, 29 aa, Artificial sequence
  Synthetic polypeptide
  MISC_FEATURE: Analog 118
  MISC_FEATURE (16)..(20): Lactam bridge between residues 16 and 20
YSQGTFTSDYSKYLDEIHQKEFVNWLLAQ

SEQ ID NO: 1036 - protein, 39 aa, Artificial sequence
  Synthetic polypeptide
  MISC_FEATURE: Analog 120
  MISC_FEATURE (16)..(20): Lactam bridge between residues 16 and 20
YSQGTFTSDYSKYLDEQAAKEFIAWLMNGGPSSGAPPPS

SEQ ID NO: 1037 - protein, 29 aa, Artificial sequence
  Synthetic polypeptide
  MISC_FEATURE: Analog 124
  MISC_FEATURE (16)..(20): Lactam bridge between residues 16 and 20
HSQGTFTSDYSIYMDEIHQKDFVNWLLAQ

SEQ ID NO: 1038 - protein, 29 aa, Artificial sequence
  Synthetic polypeptide
  MISC_FEATURE: Analog 125
  MISC_FEATURE (16)..(20): Lactam bridge between residues 16 and 20
YSQGTFTSDYSIYMDEIHQKDFVNWLLAQ

SEQ ID NO: 1039 - protein, 39 aa, Artificial sequence
  Synthetic polypeptide
  MISC_FEATURE: Analog 127
  MISC_FEATURE (16)..(20): Lactam bridge between residues 16 and 20
YSQGTFTSDYSKYLDEQAAKEFVNWLLAGGPSSGAPPPS

SEQ ID NO: 1040 - protein, 39 aa, Artificial sequence
  Synthetic polypeptide
  MISC_FEATURE: Analog 128
  MISC_FEATURE (16)..(20): Lactam bridge between residues 16 and 20
HSQGTFTSDYSKYLDEIHQKDFIAWLMNGGPSSGAPPPS

SEQ ID NO: 1041 - protein, 39 aa, Artificial sequence
  Synthetic polypeptide
  MISC_FEATURE: Analog 129
  MISC_FEATURE (16)..(20): Lactam bridge between residues 16 and 20
YSQGTFTSDYSKYLDEIHQKDFIAWLMNGGPSSGAPPPS

SEQ ID NO: 1042 - protein, 39 aa, Artificial sequence
  Synthetic polypeptide
  MISC_FEATURE: Analog 139
  MISC_FEATURE (16)..(20): Lactam bridge between residues 16 and 20
YSQGTFTSDYSKYLDEQAAKEFIAWLLAGGPSSGAPPPS

SEQ ID NO: 1043 - protein, 39 aa, Artificial sequence
  Synthetic polypeptide
  MISC_FEATURE: Analog 140
  MISC_FEATURE (16)..(20): Lactam bridge between residues 16 and 20
YSQGTFTSDYSIYLDEQAAKEFVNWLLAGGPSSGAPPPS

SEQ ID NO: 1044 - protein, 39 aa, Artificial sequence
  Synthetic polypeptide
  MISC_FEATURE: Analog 141
  MISC_FEATURE (16)..(20): Lactam bridge between residuess 16 and 20
YSQGTFTSDYSKYMDEQAAKEFVNWLLAGGPSSGAPPPS

SEQ ID NO: 1045 - protein, 39 aa, Artificial sequence
  Synthetic polypeptide
  MISC_FEATURE: Analog 142
  MISC_FEATURE (16)..(20): Lactam bridge between residues 16 and 20
YAEGTFTSDYSIYMDEQAAKEFVNWLLAGGPSSGAPPPS

SEQ ID NO: 1046 - protein, 39 aa, Artificial sequence
  Synthetic polypeptide
  MISC_FEATURE: Analog 143
  MISC_FEATURE (16)..(20): Lactam bridge between residues 16 and 20
YSQGTFTSDYSKYLDERRAKEFVNWLLAGGPSSGAPPPS

SEQ ID NO: 1047 - protein, 39 aa, Artificial sequence
  Synthetic polypeptide
  MISC_FEATURE: Analog 144
  MISC_FEATURE (16)..(20): Lactam bridge between residues 16 and 20
YAQGTFTSDYSIYMDEQAAKEFVNWLLAGGPSSGAPPPS

SEQ ID NO: 1048 - protein, 39 aa, Artificial sequence
  Synthetic polypeptide
  MISC_FEATURE: Analog 145
  MISC_FEATURE (16)..(20): Lactam bridge between residues 16 and 20
YAQGTFISDYSKYLDEQAAKEFVNWLLAGGPSSGAPPPS

SEQ ID NO: 1049 - protein, 39 aa, Artificial sequence; identical to SEQ ID NO: 1048
  Synthetic polypeptide
  MISC_FEATURE: Analog 146
  MISC_FEATURE (16)..(20): Lactam bridge between residues 16 and 20

SEQ ID NO: 1050 - protein, 39 aa, Artificial sequence
  Synthetic polypeptide
  MISC_FEATURE: Analog 147
  MISC_FEATURE (16)..(20): Lactam bridge between residues 16 and 20
YSQGTFTSDYSIYLDEQAAKEFIAWLLAGGPSSGAPPPS

SEQ ID NO: 1051 - protein, 39 aa, Artificial sequence
  Synthetic polypeptide
  MISC_FEATURE: Analog 148
  MISC_FEATURE (16)..(20): Lactam bridge between residues 16 and 20
YSEGTFTSDYSIYLDEQAAKEFIAWLLAGGPSSGAPPPS

SEQ ID NO: 1052 - protein, 39 aa, Artificial sequence
  Synthetic polypeptide
  MISC_FEATURE: Analog 149
  MISC_FEATURE (16)..(20): Lactam bridge between residues 16 and 20
YAEGTFTSDYSIYLDEQAAKEFVNWLLAGGPSSGAPPPS

SEQ ID NO: 1053 - protein, 39 aa, Artificial sequence
  Synthetic polypeptide
  MISC_FEATURE: Analog 150
  MISC_FEATURE (16)..(20): Lactam bridge between residues 16 and 20
YSQGTFISDYSIYLDEQAAKEFVNWLLAGGPSSGAPPPS

SEQ ID NO: 1054 - protein, 39 aa, Artificial sequence; identical to SEQ ID NO: 1042
  Synthetic polypeptide
  MISC_FEATURE: Analog 151
  MISC_FEATURE (16)..(20): Lactam bridge between residues 16 and 20

SEQ ID NO: 1055 - protein, 39 aa, Artificial sequence
  Synthetic polypeptide
  MISC_FEATURE: Analog 152
  MOD_RES (2)..(2): Xaa is Aib
  MISC_FEATURE (16)..(20): Lactam bridge between residues 16 and 20
YXQGTFTSDYSIYLDEQAAKEFVNWLLAGGPSSGAPPPS

SEQ ID NO: 1056 - protein, 39 aa, Artificial sequence
  Synthetic polypeptide
  MISC_FEATURE: Analog 154
  MOD_RES (1)..(1): Xaa is hippuric acid
  MISC_FEATURE (16)..(20): Lactam bridge between residues 16 and 20
XSQGTFTSDYSIYLDEQAAKEFVNWLLAGGPSSGAPPPS

SEQ ID NO: 1057 - protein, 39 aa, Artificial sequence; identical to SEQ ID NO: 1039
  Synthetic polypeptide
  MISC_FEATURE: Analog 155
  MISC_FEATURE (12)..(16): Lactam bridge between residues 12 and 16

SEQ ID NO: 1058 - protein, 39 aa, Artificial sequence
  Synthetic polypeptide
  MISC_FEATURE: Analog 156
  MISC_FEATURE (20)..(24): Lactam bridge between residues 20 and 24
YSQGTFTSDYSIYLDEQAAKEFVEWLLAGGPSSGAPPPS

SEQ ID NO: 1059 - protein, 39 aa, Artificial sequence
  Synthetic polypeptide
  MISC_FEATURE: Analog 157
  MISC_FEATURE (24)..(28): Lactam bridge between residues 24 and 28
YSQGTFTSDYSIYLDEQAAKEFVEWLLKGGPSSGAPPPS

SEQ ID NO: 1060 - protein, 39 aa, Artificial sequence
  Synthetic polypeptide
  MISC_FEATURE: Analog 158
  MOD_RES (2)..(2): Xaa is Aib
  MISC_FEATURE (16)..(20): Lactam bridge between residues 16 and 20
YXQGTFTSDYSIYLDEQAAKEFVCWLLAGGPSSGAPPPS

SEQ ID NO: 1061 - protein, 39 aa, Artificial sequence
  Synthetic polypeptide
  MISC_FEATURE: Analog 162
  MOD_RES (2)..(2): Xaa is Aib
  MISC_FEATURE (16)..(20): Lactam bridge between residues 16 and 20
YXQGTFTSDYSYYLDEQAVKEFVNWLIAGGPSSGAPPPS

SEQ ID NO: 1062 - protein, 29 aa, Artificial sequence
  Synthetic polypeptide
  MISC_FEATURE: Analog 163
  MISC_FEATURE (16)..(20): Lactam bridge between residues 16 and 20
YSQGTFTSDYSIYLDEQAAKEFVNWLLAG

SEQ ID NO: 1063 - protein, 29 aa, Artificial sequence
  Synthetic polypeptide
  MISC_FEATURE: Analog 164
  MOD_RES (2)..(2): Xaa is Aib
  MISC_FEATURE (16)..(20): Lactam bridge between residues 16 and 20
YXQGTFTSDYSIYLDEQAAKEFVNWLLAG

SEQ ID NO: 1064 - protein, 40 aa, Artificial sequence
  Synthetic polypeptide
  MISC_FEATURE: Analog 165
  MOD_RES (2)..(2): Xaa is Aib
  MISC_FEATURE (16)..(20): Lactam bridge between residues 16 and 20
YXQGTFTSDYSIYLDEQAAKEFVNWLLAGGPSSGAPPPSC

SEQ ID NO: 1065 - protein, 40 aa, Artificial sequence; identical to SEQ ID NO: 1064
  Synthetic polypeptide
  MISC_FEATURE: Analog 166
  MOD_RES (2)..(2): Xaa is d-alanine
  MISC_FEATURE (16)..(20): Lactam bridge between residues 16 and 20

SEQ ID NO: 1066 - protein, 39 aa, Artificial sequence
  Synthetic polypeptide
  MISC_FEATURE: Analog 167
  MISC_FEATURE (17)..(20): Lactam bridge between residues 17 and 20
YSQGTFTSDYSIYLDEEAAKEFVNWLLAGGPSSGAPPPS

SEQ ID NO: 1067 - protein, 39 aa, Artificial sequence
  Synthetic polypeptide
  MISC_FEATURE: Analog 168
  MISC_FEATURE (18)..(21): Lactam bridge between residues 18 and 21
YSQGTFTSDYSIYLDEQKAKEFVNWLLAGGPSSGAPPPS

SEQ ID NO: 1068 - protein, 29 aa, Artificial sequence
  Synthetic polypeptide
  MISC_FEATURE: Analog 169
  MOD_RES (2)..(2): Xaa is Aib
  MISC_FEATURE (16)..(20): Lactam bridge between residues 16 and 20
YXQGTFTSDYSIYLDEQAAKEFVCWLLAG

SEQ ID NO: 1069 - protein, 40 aa, Artificial sequence; identical to SEQ ID NO: 1064
  Synthetic polypeptide
  MISC_FEATURE: Analog 170
  MOD_RES (2)..(2): Xaa is Aib
  MISC_FEATURE (16)..(20): Lactam bridge between residues 16 and 20
  MISC_FEATURE (40)..(40): PEG (40kDa) covalently attached to Cysteine

SEQ ID NO: 1070 - protein, 29 aa, Artificial sequence
  Synthetic polypeptide
  MISC_FEATURE: Analog 172
  MOD_RES (2)..(2): Xaa is Aib
  MISC_FEATURE (16)..(20): Lactam bridge between residues 16 and 20
  MISC_FEATURE (24)..(24): PEG (40kDa) covalently attached to Cysteine
YXQGTFTSDYSIYLDEQAAKEFVCWLLAG

SEQ ID NO: 1071 - protein, 40 aa, Artificial sequence
  Synthetic polypeptide
  MISC_FEATURE: Analog 174
  MOD_RES (2)..(2): Xaa is Aib
  MISC_FEATURE (16)..(20): Lactam bridge between residues 16 and 20
YXEGTFTSDYSIYLDEQAAKEFVNWLLAGGPSSGAPPPSC

SEQ ID NO: 1072 - protein, 39 aa, Artificial sequence; identical to SEQ ID NO: 1060
  Synthetic polypeptide
  MISC_FEATURE: Analog 175
  MOD_RES (2)..(2): Xaa is Aib
  MISC_FEATURE (16)..(20): Lactam bridge between residues 16 and 20
  MISC_FEATURE (24)..(24): PEG (40kDa) covalently attached to Cysteine

SEQ ID NO: 1073 - protein, 40 aa, Artificial sequence
  Synthetic polypeptide
  MISC_FEATURE: Analog 176
  MOD_RES (2)..(2): Xaa is Aib
  MISC_FEATURE (16)..(20): Lactam bridge between residues 16 and 20
YXQGTFISDYSIYLDEQAAKEFVNWLLAGGPSSGAPPPSC

SEQ ID NO: 1074 - protein, 29 aa, Artificial sequence
  Synthetic polypeptide
  MISC_FEATURE: Analog 177
  MOD_RES (2)..(2): Xaa is Aib
  MISC_FEATURE (16)..(20): Lactam bridge between residues 16 and 20
YXQGTFISDYSIYLDEQAAKEFVCWLLAG

SEQ ID NO: 1075 - protein, 40 aa, Artificial sequence; identical to SEQ ID NO: 1071
  Synthetic polypeptide
  MISC_FEATURE: Analog 178
  MOD_RES (2)..(2): Xaa is Aib
  MISC_FEATURE (16)..(20): Lactam bridge between residues 16 and 20
  MISC_FEATURE (40)..(40): PEG (40kDa) covalently attached to Cysteine

SEQ ID NO: 1076 - protein, 29 aa, Artificial sequence
  Synthetic polypeptide
  MISC_FEATURE: Analog 179
  MOD_RES (2)..(2): Xaa is Aib
  MISC_FEATURE (16)..(20): Lactam bridge between residues 16 and 20
  MISC_FEATURE (24)..(24): PEG (40kDa) covalently attached to Cysteine
YXQGTFISDYSIYLDEQAAKEFVCWLLAG

SEQ ID NO: 1077 - protein, 40 aa, Artificial sequence; identical to SEQ ID NO: 1073
  Synthetic polypeptide
  MISC_FEATURE: Analog 182
  MOD_RES (2)..(2): Xaa is Aib
  MISC_FEATURE (16)..(20): Lactam bridge between residues 16 and 20
  MISC_FEATURE (40)..(40): PEG (40kDa) covalently attached to Cysteine

SEQ ID NO: 1078 - protein, 29 aa, Artificial sequence
  Synthetic polypeptide
  MISC_FEATURE: Analog 186
  MOD_RES (2)..(2): Xaa is Aib
  MISC_FEATURE (16)..(20): Lactam bridge between residues 16 and 20
  MISC_FEATURE (24)..(24): PEG (40kDa) covalently attached to Cysteine
YXQGTFTSDYSIYLDEQAAKEFVCWLMNG

SEQ ID NO: 1079 - protein, 39 aa, Artificial sequence; identical to SEQ ID NO: 1055
  Synthetic polypeptide
  MISC_FEATURE: Analog 191
  MOD_RES (2)..(2): Xaa is Aib

SEQ ID NO: 1080 - protein, 34 aa, Artificial sequence
  Synthetic polypeptide
  MISC_FEATURE: Analog 192
FTSDYSIYLDEQAAKEFVNWLLAGGPSSGAPPPS

SEQ ID NO: 1081 - protein, 38 aa, Artificial sequence
  Synthetic polypeptide
  MISC_FEATURE: Analog 194
  MOD_RES (1)..(1): Xaa is Aib
XQGTFTSDYSIYLDEEAVRLFVNWLLAGGPSSGAPPPS

SEQ ID NO: 1082 - protein, 26 aa, Artificial sequence
  Synthetic polypeptide
  MISC_FEATURE: Analog 197
  MISC_FEATURE (13)..(17): Lactam bridge between residues 13 and 17
GTFTSDYSIYLDEQAAKEFVNWLLAG

SEQ ID NO: 1083 - protein, 28 aa, Artificial sequence
  Synthetic polypeptide
  MISC_FEATURE: Analog 198
  MOD_RES (1)..(1): Xaa is Aib
  MISC_FEATURE (15)..(19): Lactam bridge between residues 15 and 19
XQGTFTSDYSIYLDEQAAKEFVNWLLAG

SEQ ID NO: 1084 - protein, 40 aa, Artificial sequence
  Synthetic polypeptide
  MISC_FEATURE: Analog 199
  MOD_RES (2)..(2): Xaa is Aib
  MISC_FEATURE (16)..(20): Lactam bridge between residues 16 and 20
YXQGTFVSDYSIYLDEQAAKEFVNWLLAGGPSSGAPPPSC

SEQ ID NO: 1085 - protein, 40 aa, Artificial sequence
  Synthetic polypeptide
  MISC_FEATURE: Analog 200
  MOD_RES (2)..(2): Xaa is Aib
  MISC_FEATURE (16)..(20): Lactam bridge between residues 16 and 20
  MOD_RES (27)..(27): Xaa is Nle
YXQGTFTSDYSIYLDEQAAKEFVNWLXAGGPSSGAPPPSC

SEQ ID NO: 1086 - protein, 39 aa, Artificial sequence
  Synthetic polypeptide
  MISC_FEATURE: Analog 201
  MOD_RES (2)..(2): Xaa is Aib
YXQGTFTSDYSIYLDEEAVRLFVNWLLAGGPSSGAPPPS

SEQ ID NO: 1087 - protein, 40 aa, Artificial sequence; identical to SEQ ID NO: 1084
  Synthetic polypeptide
  MISC_FEATURE: Analog 202
  MOD_RES (2)..(2): Xaa is Aib
  MISC_FEATURE (16)..(20): Lactam bridge between residues 16 and 20
  MISC_FEATURE (40)..(40): PEG (40kDa) covalently attached to Cysteine

SEQ ID NO: 1088 - protein, 40 aa, Artificial sequence; identical to SEQ ID NO: 1085
  Synthetic polypeptide
  MISC_FEATURE: Analog 203
  MOD_RES (2)..(2): Xaa is Aib
  MISC_FEATURE (16)..(20): Lactam bridge between residues 16 and 20
  MOD_RES (27)..(27): Xaa is Nle
  MISC_FEATURE (40)..(40): PEG (40kDa) covalently attached to Cysteine

SEQ ID NO: 1089 - protein, 40 aa, Artificial sequence
  Synthetic polypeptide
  MISC_FEATURE: Analog 204
  MOD_RES (2)..(2): Xaa is Aib
  MISC_FEATURE (16)..(20): Lactam bridge between residues 16 and 20
YXEGTFTSDYSIYLDEQAAKEFVNWLLAGRPSSGAPPPSC

SEQ ID NO: 1090 - protein, 40 aa, Artificial sequence; identical to SEQ ID NO: 1089
  Synthetic polypeptide
  MISC_FEATURE: Analog 205
  MOD_RES (2)..(2): Xaa is Aib
  MISC_FEATURE (16)..(20): Lactam bridge between residues 16 and 20
  MISC_FEATURE (40)..(40): PEG (40kDa) covalently attached to Cysteine

SEQ ID NO: 1091 - protein, 43 aa, Artificial sequence
  Synthetic polypeptide
  MISC_FEATURE: Analog 206
  MOD_RES (2)..(2): Xaa is Aib
  MISC_FEATURE (16)..(20): Lactam bridge between residues 16 and 20
YXEGTFTSDYSIYLDEQAAKEFVNWLLAGKGKKNWLKHNITQC

SEQ ID NO: 1092 - protein, 43 aa, Artificial sequence
  Synthetic polypeptide
  MISC_FEATURE: Analog 207
  MOD_RES (2)..(2): Xaa is Aib
  MISC_FEATURE (16)..(20): Lactam bridge between residues 16 and 20
YXQGTFTSDYSIYLDEQAAKEFVNWLLAGKGKKNWLKHNITQC

SEQ ID NO: 1093 - protein, 43 aa, Artificial sequence; identical to SEQ ID NO: 1091
  Synthetic polypeptide
  MISC_FEATURE: Analog 208
  MOD_RES (2)..(2): Xaa is Aib
  MISC_FEATURE (16)..(20): Lactam bridge between residues 16 and 20
  MISC_FEATURE (43)..(43): PEG (40kDa) covalently attached to Cysteine

SEQ ID NO: 1094 - protein, 40 aa, Artificial sequence
  Synthetic polypeptide
  MISC_FEATURE: Analog 209
  MOD_RES (2)..(2): Xaa is Aib
  MISC_FEATURE (9)..(12): Lactam bridge between residues 9 and 12
  MISC_FEATURE (16)..(20): Lactam bridge between residues 16 and 20
YXQGTFTSEYSKYLDEQAAKEFVNWLLAGGPSSGAPPPSC

SEQ ID NO: 1095 - protein, 10 aa, Artificial sequence
  Synthetic polypeptide
  MISC_FEATURE: CEX
GPSSGAPPPS

SEQ ID NO: 1096 - protein, 11 aa, Artificial sequence
  Synthetic polypeptide
  MISC_FEATURE (1)..(1): Xaa is any amino acid
XGPSSGAPPPS

SEQ ID NO: 1097 - protein, 8 aa, Artificial sequence
  Synthetic polypeptide
KRNRNNIA

SEQ ID NO: 1098 - protein, 4 aa, Artificial sequence
  Synthetic polypeptide
KRNR

SEQ ID NO: 1099 - protein, 40 aa, Artificial Sequence
  Synthetic polypeptide
  MOD_RES (2)..(2): Xaa is Aib
  MOD_RES (20)..(20): Xaa is Aib
  MISC_FEATURE (40)..(40): PEG (40kDa) covalently attached to Cysteine
  MISC_FEATURE (40)..(40): C-terminal amidation
YXEGTFTSDYSIYLDKQAAXEFVNWLLAGGPSSGAPPPSC

SEQ ID NO: 1100 - protein, 40 aa, Artificial Sequence
  Synthetic polypeptide
  MOD_RES (2)..(2): Xaa is Aib
  MOD_RES (20)..(20): Xaa is Aib
  MISC_FEATURE (24)..(24): PEG (40kDa) covalently attached to Cysteine
  MISC_FEATURE (40)..(40): C-terminal amidation
YXEGTFTSDYSIYLDKQAAXEFVCWLLAGGPSSGAPPPSK

SEQ ID NO: 1101 - protein, 40 aa, Artificial Sequence; identical to SEQ ID NO: 1100
  Synthetic polypeptide
  MOD_RES (2)..(2): Xaa is Aib
  MOD_RES (20)..(20): Xaa is Aib
  MISC_FEATURE (24)..(24): PEG (40kDa) covalently attached to Cysteine
  MISC_FEATURE (40)..(40): 16 Carbon fatty acyl group covalently attached to Lysine
  MISC_FEATURE (40)..(40): C-terminal amidation

SEQ ID NO: 1102 - protein, 40 aa, Artificial Sequence; identical to SEQ ID NO: 1100
  Synthetic polypeptide
  MOD_RES (2)..(2): Xaa is Aib
  MOD_RES (20)..(20): Xaa is Aib
  MISC_FEATURE (24)..(24): PEG (40kDa) covalently attached to Cysteine
  MISC_FEATURE (40)..(40): 14 Carbon fatty acyl group covalently attached Lysine
  MISC_FEATURE (40)..(40): C-terminal amidation

SEQ ID NO: 1103 - protein, 40 aa, Artificial Sequence; identical to SEQ ID NO: 1100
  Synthetic polypeptide
  MOD_RES (2)..(2): Xaa is Aib
  MOD_RES (20)..(20): Xaa is Aib
  MISC_FEATURE (24)..(24): PEG (40kDa) covalently attached to Cysteine
  MISC_FEATURE (40)..(40): 18 Carbon fatty acyl group covalently attached to Lysine
  MISC_FEATURE (40)..(40): C-terminal amidation

SEQ ID NO: 1104 - protein, 40 aa, Artificial Sequence
  Synthetic polypeptide
  MOD_RES (2)..(2): Xaa is Aib
  MOD_RES (20)..(20): Xaa is Aib
  MISC_FEATURE (40)..(40): 14 Carbon fatty acyl group covalently attached to Lysine
  MISC_FEATURE (40)..(40): C-terminal amidation
YXEGTFTSDYSIYLDKQAAXEFVNWLLAGGPSSGAPPPSK

SEQ ID NO: 1105 - protein, 40 aa, Artificial Sequence; identical to SEQ ID NO: 1104
  Synthetic polypeptide
  MOD_RES (2)..(2): Xaa is Aib
  MOD_RES (20)..(20): Xaa is Aib
  MISC_FEATURE (40)..(40): 16 Carbon fatty acyl group covalently attached Lysine
  MISC_FEATURE (40)..(40): C-terminal amidation

SEQ ID NO: 1106 - protein, 40 aa, Artificial Sequence; identical to SEQ ID NO: 1104
  Synthetic polypeptide
  MOD_RES (2)..(2): Xaa is Aib
  MOD_RES (20)..(20): Xaa is Aib
  MISC_FEATURE (40)..(40): 18 Carbon fatty acyl group covalently attached to Lysine
  MISC_FEATURE (40)..(40): C-terminal amidation

SEQ ID NO: 1107 - protein, 40 aa, Artificial Sequence
  Synthetic polypeptide
  MOD_RES (2)..(2): Xaa is Aib
  MOD_RES (20)..(20): Xaa is Aib
  MISC_FEATURE (40)..(40): C-terminal amidation
YXQGTFTSDYSIYLDKQAAXEFVNWLLAGGPSSGAPPPSC

SEQ ID NO: 1108 - protein, 40 aa, Artificial Sequence; identical to SEQ ID NO: 1107
  Synthetic polypeptide
  MOD_RES (2)..(2): Xaa is Aib
  MOD_RES (20)..(20): Xaa is Aib
  MISC_FEATURE (40)..(40): PEG (40kDa) attached to Cysteine
  MISC_FEATURE (40)..(40): C-terminal amidation

SEQ ID NO: 1109 - protein, 40 aa, Artificial Sequence; identical to SEQ ID NO: 1099
  Synthetic polypeptide
  MOD_RES (2)..(2): Xaa is Aib
  MOD_RES (20)..(20): Xaa is Aib
  MISC_FEATURE (40)..(40): C-terminal amidation

SEQ ID NO: 1110 - protein, 29 aa, Artificial Sequence
  Synthetic polypeptide
  MOD_RES (2)..(2): Xaa is Aib
  MOD_RES (20)..(20): Xaa is Aib
  MISC_FEATURE (29)..(29): C-terminal amidation
YXQGTFTSDYSIYLDKQAAXEFVCWLLAG

SEQ ID NO: 1111 - protein, 40 aa, Artificial Sequence; identical to SEQ ID NO: 1104
  Synthetic polypeptide
  MOD_RES (2)..(2): Xaa is Aib
  MOD_RES (20)..(20): Xaa is Aib
  MISC_FEATURE (40)..(40): C-terminal amidation

SEQ ID NO: 1112 - protein, 29 aa, Artificial Sequence
  Synthetic polypeptide
  MISC_FEATURE (2)..(2): Xaa is Aib
  MISC_FEATURE (20)..(20): Xaa is Aib
YXQGTFTSDYSIYLDKQAAXEFVNWLLAG

SEQ ID NO: 1113 - protein, 39 aa, Artificial Sequence
  Synthetic polypeptide
  MOD_RES (2)..(2): Xaa is Aib
  MOD_RES (20)..(20): Xaa is Aib
  MISC_FEATURE (24)..(24): 14 Carbon fatty acyl group covalently attached to Lysine
  MISC_FEATURE (39)..(39): C-terminal amidation
YXEGTFTSDYSIYLDKQAAXEFVKWLLAGGPSSGAPPPS

SEQ ID NO: 1114 - protein, 39 aa, Artificial Sequence; identical to SEQ ID NO: 1113
  Synthetic polypeptide
  MOD_RES (2)..(2): Xaa is Aib
  MOD_RES (20)..(20): Xaa is Aib
  MISC_FEATURE (24)..(24): 16 Carbon fatty acyl group covalently attached to Lysine
  MISC_FEATURE (39)..(39): C-terminal amidation

SEQ ID NO: 1115 - protein, 39 aa, Artificial Sequence; identical to SEQ ID NO: 1113
  Synthetic polypeptide
  MOD_RES (2)..(2): Xaa is Aib
  MOD_RES (20)..(20): Xaa is Aib
  MISC_FEATURE (24)..(24): 18 Carbon fatty acyl group covalently attached to Lysine
  MISC_FEATURE (39)..(39): C-terminal amidation

SEQ ID NO: 1116 - protein, 39 aa, Artificial Sequence; identical to SEQ ID NO: 1113
  Synthetic polypeptide
  MOD_RES (2)..(2): Xaa is Aib
  MOD_RES (20)..(20): Xaa is Aib
  MISC_FEATURE (39)..(39): C-terminal amidation

SEQ ID NO: 1117 - protein, 39 aa, Artificial Sequence
  Synthetic polypeptide
  MOD_RES (2)..(2): Xaa is Aib
  MISC_FEATURE (10)..(10): 14 Carbon fatty acyl group covalently attached to Lysine
  MOD_RES (20)..(20): Xaa is Aib
  MISC_FEATURE (39)..(39): C-terminal amidation
YXEGTFTSDKSIYLDKQAAXEFVNWLLAGGPSSGAPPPS

SEQ ID NO: 1118 - protein, 39 aa, Artificial Sequence; identical to SEQ ID NO: 1117
  Synthetic polypeptide
  MOD_RES (2)..(2): Xaa is Aib
  MISC_FEATURE (10)..(10): 16 Carbon fatty acyl group covalently attached to Lysine
  MOD_RES (20)..(20): Xaa is Aib
  MISC_FEATURE (39)..(39): C-terminal amidation

SEQ ID NO: 1119 - protein, 39 aa, Artificial Sequence; identical to SEQ ID NO: 1117
  Synthetic polypeptide
  MOD_RES (2)..(2): Xaa is Aib
  MISC_FEATURE (10)..(10): 18 Carbon fatty acyl group covalently attached to Lysine
  MOD_RES (20)..(20): Xaa is Aib
  MISC_FEATURE (39)..(39): C-terminal amidation

SEQ ID NO: 1120 - protein, 39 aa, Artificial Sequence; identical to SEQ ID NO: 1117
  Synthetic polypeptide
  MOD_RES (2)..(2): Xaa is Aib
  MOD_RES (20)..(20): Xaa is Aib
  MISC_FEATURE (39)..(39): C-terminal amidation

SEQ ID NO: 1121 - protein, 40 aa, Artificial Sequence
  Synthetic polypeptide
  MOD_RES (2)..(2): Xaa is Aib
  MOD_RES (16)..(16): Xaa is Orn
  MOD_RES (20)..(20): Xaa is Aib
  MISC_FEATURE (40)..(40): C-terminal amidation
YXQGTFTSDYSIYLDXQAAXEFVNWLLAGGPSSGAPPPSC

SEQ ID NO: 1122 - protein, 40 aa, Artificial Sequence; identical to SEQ ID NO: 1121
  Synthetic polypeptide
  MOD_RES (2)..(2): Xaa is Aib
  MOD_RES (16)..(16): Xaa is 2,4-diaminobutyric acid
  MOD_RES (20)..(20): Xaa is Aib
  MISC_FEATURE (40)..(40): C-terminal amidation

SEQ ID NO: 1123 - protein, 40 aa, Artificial Sequence
  Synthetic polypeptide
  MOD_RES (2)..(2): Xaa is Aib
  MOD_RES (20)..(20): Xaa is Aib
  MISC_FEATURE (40)..(40): 14 Carbon fatty acyl group covalentaly attached to Lysine
  MISC_FEATURE (40)..(40): C-terminal amidation
YXQGTFTSDYSIYLDKQAAXEFVNWLLAGGPSSGAPPPSK

SEQ ID NO: 1124 - protein, 40 aa, Artificial Sequence; identical to SEQ ID NO: 1123
  Synthetic polypeptide
  MOD_RES (2)..(2): Xaa is Aib
  MOD_RES (20)..(20): Xaa is Aib
  MISC_FEATURE (40)..(40): 16 Carbon fatty acyl group covalently attached to Lysine
  MISC_FEATURE (40)..(40): C-terminal amidation

SEQ ID NO: 1125 - protein, 40 aa, Artificial Sequence; identical to SEQ ID NO: 1123
  Synthetic polypeptide
  MOD_RES (2)..(2): Xaa is Aib
  MOD_RES (20)..(20): Xaa is Aib
  MISC_FEATURE (40)..(40): 18 Carbon fatty acyl group covalently attached to Lysine
  MISC_FEATURE (40)..(40): C-terminal amidation

SEQ ID NO: 1126 - protein, 40 aa, Artificial Sequence; identical to SEQ ID NO: 1123
  Synthetic polypeptide
  MOD_RES (2)..(2): Xaa is Aib
  MOD_RES (20)..(20): Xaa is Aib
  MISC_FEATURE (40)..(40): C-terminal amidation

SEQ ID NO: 1127 - protein, 29 aa, Artificial Sequence
  Synthetic polypeptide
  MOD_RES (2)..(2): Xaa is Aib
  MOD_RES (20)..(20): Xaa is Aib
  MISC_FEATURE (24)..(24): PEG (40kDa) covalently attached to Cysteine
  MISC_FEATURE (29)..(29): C-terminal amidation
YXQGTFTSDYSIYLDKQAAXEFVCWLLAG

SEQ ID NO: 1128 - protein, 29 aa, Artificial Sequence
  Synthetic polypeptide
  MOD_RES (2)..(2): Xaa is Aib
  MISC_FEATURE (10)..(10): 14 Carbon fatty acyl group covalently attached to Lysine
  MOD_RES (20)..(20): Xaa is Aib
  MISC_FEATURE (29)..(29): C-terminal amidation
YXEGTFTSDKSIYLDKQAAXEFVNWLLAG

SEQ ID NO: 1129 - protein, 29 aa, Artificial Sequence
  Synthetic polypeptide
  MOD_RES (2)..(2): Xaa is Aib
  MISC_FEATURE (10)..(10): 16 Carbon fatty acyl group covalently attached to Lysine
  MOD_RES (20)..(20): Xaa is Aib
  MISC_FEATURE (29)..(29): C-terminal amidation
YXEGTFTSDKSIYLDKQAAXEFVNWLLAG

SEQ ID NO: 1130 - protein, 29 aa, Artificial Sequence
  Synthetic polypeptide
  MOD_RES (2)..(2): Xaa is Aib
  MISC_FEATURE (10)..(10): 18 Carbon fatty acyl group covalently attached to Lysine
  MOD_RES (20)..(20): Xaa is Aib
  MISC_FEATURE (29)..(29): C-terminal amidation
YXEGTFTSDKSIYLDKQAAXEFVNWLLAG

SEQ ID NO: 1131 - protein, 29 aa, Artificial Sequence
  Synthetic polypeptide
  MOD_RES (2)..(2): Xaa is Aib
  MOD_RES (20)..(20): Xaa is Aib
  MISC_FEATURE (29)..(29): C-terminal amidation
YXEGTFTSDKSIYLDKQAAXEFVNWLLAG

SEQ ID NO: 1132 - protein, 40 aa, Artificial Sequence
  Synthetic polypeptide
  MOD_RES (2)..(2): Xaa is Aib
  MOD_RES (20)..(20): Xaa is Aib
  MISC_FEATURE (40)..(40): 14 Carbon fatty acyl group covalently attached to Lysine
  MISC_FEATURE (40)..(40): C-terminal amidation
YXQGTFTSDYSIYLDKQAAXEFVCWLLAGGPSSGAPPPSK

SEQ ID NO: 1133 - protein, 40 aa, Artificial Sequence; identical to SEQ ID NO: 1132
  Synthetic polypeptide
  MOD_RES (2)..(2): Xaa is Aib
  MOD_RES (20)..(20): Xaa is Aib
  MISC_FEATURE (40)..(40): 16 Carbon fatty acyl group covalently attached to Lysine
  MISC_FEATURE (40)..(40): C-terminal amidation

SEQ ID NO: 1134 - protein, 40 aa, Artificial Sequence; identical to SEQ ID NO: 1132
  Synthetic polypeptide
  MOD_RES (2)..(2): Xaa is Aib
  MOD_RES (20)..(20): Xaa is Aib
  MISC_FEATURE (40)..(40): 18 Carbon fatty acyl group covalently attached to Lysine
  MISC_FEATURE (40)..(40): C-terminal amidation

SEQ ID NO: 1135 - protein, 40 aa, Artificial Sequence; identical to SEQ ID NO: 1132
  Synthetic polypeptide
  MOD_RES (2)..(2): Xaa is Aib
  MOD_RES (20)..(20): Xaa is Aib
  MISC_FEATURE (40)..(40): C-terminal amidation

SEQ ID NO: 1136 - protein, 40 aa, Artificial Sequence; identical to SEQ ID NO: 1132
  Synthetic polypeptide
  MOD_RES (2)..(2): Xaa is Aib
  MOD_RES (20)..(20): Xaa is Aib
  MISC_FEATURE (24)..(24): PEG (40kDa) covalently attached to Cysteine
  MISC_FEATURE (40)..(40): 14 Carbon fatty acyl group covalently attached to Lysine
  MISC_FEATURE (40)..(40): C-terminal amidation

SEQ ID NO: 1137 - protein, 40 aa, Artificial Sequence; identical to SEQ ID NO: 1132
  Synthetic polypeptide
  MOD_RES (2)..(2): Xaa is Aib
  MOD_RES (20)..(20): Xaa is Aib
  MISC_FEATURE (24)..(24): PEG (40kDa) covalently attached to Cysteine
  MISC_FEATURE (40)..(40): 16 Carbon fatty acyl group covalently attached to Lysine
  MISC_FEATURE (40)..(40): C-terminal amidation

SEQ ID NO: 1138 - protein, 40 aa, Artificial Sequence; identical to SEQ ID NO: 1132
  Synthetic polypeptide
  MOD_RES (2)..(2): Xaa is Aib
  MOD_RES (20)..(20): Xaa is Aib
  MISC_FEATURE (24)..(24): PEG (40kDa) covalently attached to Cysteine
  MISC_FEATURE (40)..(40): 18 Carbon fatty acyl group covalently attached to Lysine
  MISC_FEATURE (40)..(40): C-terminal amidation

SEQ ID NO: 1139 - protein, 40 aa, Artificial Sequence; identical to SEQ ID NO: 1132
  Synthetic polypeptide
  MOD_RES (2)..(2): Xaa is Aib
  MOD_RES (20)..(20): Xaa is Aib
  MISC_FEATURE (24)..(24): PEG (40kDa) covalently attached to Cysteine
  MISC_FEATURE (40)..(40): C-terminal amidation

SEQ ID NO: 1140 - protein, 40 aa, Artificial Sequence; identical to SEQ ID NO: 1099
  Synthetic polypeptide
  MOD_RES (2)..(2): Xaa is Aib
  MOD_RES (20)..(20): Xaa is Aib
  MISC_FEATURE (40)..(40): PEG (40kDa) covalently attached to Cysteine
  MISC_FEATURE (40)..(40): C-terminal amidation

SEQ ID NO: 1141 - protein, 40 aa, Artificial Sequence; identical to SEQ ID NO: 1100
  Synthetic polypeptide
  MOD_RES (2)..(2): Xaa is Aib
  MOD_RES (20)..(20): Xaa is Aib
  MISC_FEATURE (40)..(40): 16 Carbon fatty acyl group covalently attached to Lysine
  MISC_FEATURE (40)..(40): C-terminal amidation

SEQ ID NO: 1142 - protein, 40 aa, Artificial Sequence
  Synthetic polypeptide
  MOD_RES (2)..(2): Xaa is Aib
  MOD_RES (20)..(20): Xaa is Aib
  MISC_FEATURE (40)..(40): 16 Carbon fatty acyl group covalently attached to Lysine
  MISC_FEATURE (40)..(40): C-terminal amidation
YXQGTFTSDYSIYLDKQAAXEFVCWLMNGGPSSGAPPPSK

SEQ ID NO: 1143 - protein, 40 aa, Artificial Sequence; identical to SEQ ID NO: 1142
  Synthetic polypeptide
  MOD_RES (2)..(2): Xaa is Aib
  MOD_RES (20)..(20): Xaa is Aib
  MISC_FEATURE (24)..(24): PEG (40kDa) covalently attached to Cysteine
  MISC_FEATURE (40)..(40): 16 Carbon fatty acyl group covalently attached to Lysine
  MISC_FEATURE (40)..(40): C-terminal amidation

SEQ ID NO: 1144 - protein, 40 aa, Artificial Sequence; identical to SEQ ID NO: 1100
  Synthetic polypeptide
  MOD_RES (2)..(2): Xaa is Aib
  MOD_RES (20)..(20): Xaa is Aib
  MISC_FEATURE (40)..(40): 14 Carbon fatty acyl group covalently attached to Lysine
  MISC_FEATURE (40)..(40): C-terminal amidation

SEQ ID NO: 1145 - protein, 40 aa, Artificial Sequence; identical to SEQ ID NO: 1100
  Synthetic polypeptide
  MOD_RES (2)..(2): Xaa is Aib
  MOD_RES (20)..(20): Xaa is Aib
  MISC_FEATURE (40)..(40): 18 Carbon fatty acyl group covalently attached to Lysine
  MISC_FEATURE (40)..(40): C-terminal amidation

SEQ ID NO: 1146 - protein, 40 aa, Artificial Sequence; identical to SEQ ID NO: 1100
  Synthetic polypeptide
  MOD_RES (2)..(2): Xaa is Aib
  MOD_RES (20)..(20): Xaa is Aib
  MISC_FEATURE (40)..(40): C-terminal amidation

SEQ ID NO: 1147 - protein, 40 aa, Artificial Sequence; identical to SEQ ID NO: 1104
  Synthetic polypeptide
  MOD_RES (2)..(2): Xaa is Aib
  MOD_RES (20)..(20): Xaa is Aib
  MISC_FEATURE (40)..(40): 3-SH-propionic acyl group covalently attached to Lysine
  MISC_FEATURE (40)..(40): C-terminal amidation

SEQ ID NO: 1148 - protein, 40 aa, Artificial Sequence; identical to SEQ ID NO: 1123
  Synthetic polypeptide
  MOD_RES (2)..(2): Xaa is Aib
  MOD_RES (20)..(20): Xaa is Aib
  MISC_FEATURE (40)..(40): 8 Carbon fatty acyl group covalently attached to Lysine
  MISC_FEATURE (40)..(40): C-terminal amidation

SEQ ID NO: 1149 - protein, 40 aa, Artificial Sequence
  Synthetic polypeptide
  MOD_RES (2)..(2): Xaa is Aib
  MOD_RES (20)..(20): Xaa is Aib
  MISC_FEATURE (40)..(40): C-terminal amidation
YXQGTFSSDYSIYLDKQAAXEFVNWLLAGGPSSGAPPPSC

SEQ ID NO: 1150 - protein, 40 aa, Artificial Sequence
  Synthetic polypeptide
  MOD_RES (2)..(2): Xaa is Aib
  MOD_RES (7)..(7): Xaa is 2-aminobutyric acid
  MOD_RES (20)..(20): Xaa is Aib
  MISC_FEATURE (40)..(40): C-terminal amidation
YXQGTFXSDYSIYLDKQAAXEFVNWLLAGGPSSGAPPPSC

SEQ ID NO: 1151 - protein, 40 aa, Artificial Sequence; identical to SEQ ID NO: 1132
  Synthetic polypeptide
  MOD_RES (2)..(2): Xaa is Aib
  MOD_RES (20)..(20): Xaa is Aib
  MISC_FEATURE (40)..(40): 8 Carbon fatty acyl group covalently attached to Lysine
  MISC_FEATURE (40)..(40): C-terminal amidation

SEQ ID NO: 1152 - protein, 40 aa, Artificial Sequence; identical to SEQ ID NO: 1100
  Synthetic polypeptide
  MOD_RES (2)..(2): Xaa is Aib
  MOD_RES (20)..(20): Xaa is Aib
  MISC_FEATURE (40)..(40): 8 Carbon fatty acyl group covalently attached to Lysine
  MISC_FEATURE (40)..(40): C-terminal amidation

SEQ ID NO: 1153 - protein, 40 aa, Artificial Sequence; identical to SEQ ID NO: 1100
  Synthetic polypeptide
  MOD_RES (2)..(2): Xaa is Aib
  MOD_RES (20)..(20): Xaa is Aib
  MISC_FEATURE (24)..(24): PEG (40kDa) covalently attached to Cysteine
  MISC_FEATURE (40)..(40): C-terminal amidation

SEQ ID NO: 1154 - protein, 40 aa, Artificial Sequence
  Synthetic polypeptide
  MOD_RES (2)..(2): Xaa is Aib
  MOD_RES (20)..(20): Xaa is Aib
  MOD_RES (40)..(40): Xaa is d-Lysine
  MISC_FEATURE (40)..(40): 14 Carbon fatty acyl group covalently attached to d-Lysine
  MISC_FEATURE (40)..(40): C-terminal amidation
YXEGTFTSDYSIYLDKQAAXEFVCWLLAGGPSSGAPPPSX

SEQ ID NO: 1155 - protein, 40 aa, Artificial Sequence; identical to SEQ ID NO: 1154
  Synthetic polypeptide
  MOD_RES (2)..(2): Xaa is Aib
  MOD_RES (20)..(20): Xaa is Aib
  MOD_RES (40)..(40): Xaa is d-Lysine
  MISC_FEATURE (40)..(40): C-terminal amidation

SEQ ID NO: 1156 - protein, 40 aa, Artificial Sequence; identical to SEQ ID NO: 1154
  Synthetic polypeptide
  MOD_RES (2)..(2): Xaa is Aib
  MOD_RES (20)..(20): Xaa is Aib
  MISC_FEATURE (24)..(24): PEG (40kDa) covalently attached to Cysteine
  MOD_RES (40)..(40): Xaa is d-Lysine
  MISC_FEATURE (40)..(40): 14 Carbon fatty acyl group covalently attached to Lysine
  MISC_FEATURE (40)..(40): C-terminal amidation

SEQ ID NO: 1157 - protein, 40 aa, Artificial Sequence; identical to SEQ ID NO: 1154
  Synthetic polypeptide
  MOD_RES (2)..(2): Xaa is Aib
  MOD_RES (20)..(20): Xaa is Aib
  MISC_FEATURE (24)..(24): PEG (40kDa) covalently attached to Cysteine
  MISC_FEATURE (40)..(40): Xaa is d-Lysine
  MISC_FEATURE (40)..(40): C-terminal amidation

SEQ ID NO: 1158 - protein, 39 aa, Artificial Sequence
  Synthetic polypeptide
  MOD_RES (2)..(2): Xaa is Aib
  MISC_FEATURE (10)..(10): 14 Carbon fatty acyl group covalently attached to Lysine
  MOD_RES (20)..(20): Xaa is Aib
  MISC_FEATURE (40)..(40): C-terminal amidation
YXEGTFTSDKSIYLDKQAAXEFVCWLLAGGPSSGAPPPS

SEQ ID NO: 1159 - protein, 39 aa, Artificial Sequence; identical to SEQ ID NO: 1158
  Synthetic polypeptide
  MOD_RES (2)..(2): Xaa is Aib
  MOD_RES (20)..(20): Xaa is Aib
  MISC_FEATURE (40)..(40): C-terminal amidation

SEQ ID NO: 1160 - protein, 41 aa, Artificial Sequence
  Synthetic polypeptide
  MOD_RES (2)..(2): Xaa is Aib
  MOD_RES (20)..(20): Xaa is Aib
  MISC_FEATURE (40)..(40): 14 Carbon fatty acyl group covalently attached to Lysine
  MISC_FEATURE (41)..(41): C-terminal amidation
YXEGTFTSDYSIYLDKQAAXEFVNWLLAGGPSSGAPPPSKC

SEQ ID NO: 1161 - protein, 41 aa, Artificial Sequence; identical to SEQ ID NO: 1160
  Synthetic polypeptide
  MOD_RES (2)..(2): Xaa is Aib
  MOD_RES (20)..(20): Xaa is Aib
  MISC_FEATURE (41)..(41): C-terminal amidation

SEQ ID NO: 1162 - protein, 39 aa, Artificial Sequence; identical to SEQ ID NO: 1158
  Synthetic polypeptide
  MOD_RES (2)..(2): Xaa is Aib
  MISC_FEATURE (10)..(10): 14 Carbon fatty acyl group covalently attached to Lysine
  MOD_RES (20)..(20): Xaa is Aib
  MISC_FEATURE (24)..(24): PEG (40kDa) covalently attached to Cysteine
  MISC_FEATURE (39)..(39): C-terminal amidation

SEQ ID NO: 1163 - protein, 41 aa, Artificial Sequence; identical to SEQ ID NO: 1160
  Synthetic polypeptide
  MOD_RES (2)..(2): Xaa is Aib
  MOD_RES (20)..(20): Xaa is Aib
  MISC_FEATURE (40)..(40): 14 Carbon fatty acyl group covalently attached to Lysine
  MISC_FEATURE (41)..(41): PEG (40kDa) covalently attached to Cysteine
  MISC_FEATURE (41)..(41): C-terminal amidation

SEQ ID NO: 1164 - protein, 41 aa, Artificial Sequence; identical to SEQ ID NO: 1160
  Synthetic polypeptide
  MOD_RES (2)..(2): Xaa is Aib
  MOD_RES (20)..(20): Xaa is Aib
  MISC_FEATURE (41)..(41): PEG (40kDa) covalently attached to Cysteine
  MISC_FEATURE (41)..(41): C-terminal amidation

SEQ ID NO: 1165 - protein, 40 aa, Artificial Sequence
  Synthetic polypeptide
  MOD_RES (2)..(2): Xaa is Aib
  MISC_FEATURE (40)..(40): 14 Carbon fatty acyl group covalently attached to Lysine
  MISC_FEATURE (40)..(40): C-terminal amidation
HXQGTFTSDYSKYLDEQAAKEFICWLMNGGPSSGAPPPSK

SEQ ID NO: 1166 - protein, 40 aa, Artificial Sequence; identical to SEQ ID NO: 1100
  Synthetic polypeptide
  MOD_RES (2)..(2): Xaa is Aib
  MOD_RES (20)..(20): Xaa is Aib
  MISC_FEATURE (24)..(24): PEG (40kDa) covalently attached to Cysteine
  MISC_FEATURE (40)..(40): 14 Carbon fatty acyl group covalently attached to Lysine
  MISC_FEATURE (40)..(40): C-terminal amidation

SEQ ID NO: 1167 - protein, 40 aa, Artificial Sequence
  Synthetic polypeptide
  MOD_RES (2)..(2): Xaa is Aib
  MOD_RES (16)..(16): Xaa is Aib
  MISC_FEATURE (40)..(40): C-terminal amidation
YXQGTFTSDYSIYLDXQAAKEFVNWLLAGGPSSGAPPPSC

SEQ ID NO: 1168 - protein, 40 aa, Artificial Sequence
  Synthetic polypeptide
  MOD_RES (2)..(2): Xaa is Aib
  MOD_RES (16)..(16): Xaa is Aib
  MISC_FEATURE (40)..(40): C-terminal amidation
YXQGTFTSDYSIYLDXQAAQEFVNWLLAGGPSSGAPPPSC

SEQ ID NO: 1169 - protein, 40 aa, Artificial Sequence
  Synthetic polypeptide
  MOD_RES (2)..(2): Xaa is Aib
  MOD_RES (12)..(16): Lactam bridge between residues 12 and 16
  MOD_RES (20)..(20): Xaa is Aib
  MOD_RES (40)..(40): C-terminal amidation
YXQGTFTSDYSKYLDEQAAXEFVNWLLAGGPSSGAPPPSC

SEQ ID NO: 1170 - protein, 10 aa, Artificial Sequence
  Synthetic polypeptide
GPSSGAPPPK

SEQ ID NO: 1171 - protein, 11 aa, Artificial Sequence
  Synthetic polypeptide
  MOD_RES (1)..(1): Xaa is Gly or a small, aliphatic or non-polar or slightly polar amino acid
XGPSSGAPPPK

SEQ ID NO: 1172 - protein, 12 aa, Artificial Sequence
  Synthetic  polypeptide
  MOD_RES (1)..(1): Xaa is Gly or a small, aliphatic or non-polar or slightly polar amino acid
XGPSSGAPPPSK

SEQ ID NO: 1173 - protein, 40 aa, Artificial Sequence; identical to SEQ ID NO: 1167
  Synethic polypeptide
  MOD_RES (2)..(2): Xaa is Aib
  MOD_RES (16)..(16): Xaa is Aib
  MISC_FEATURE (40)..(40): PEG (40kDa) covalently attached to Cysteine
  MISC_FEATURE (40)..(40): C-terminal amidation

SEQ ID NO: 1174 - protein, 40 aa, Artificial Sequence; identical to SEQ ID NO: 1168
  Synthetic polypeptide
  MOD_RES (2)..(2): Xaa is Aib
  MOD_RES (16)..(16): Xaa is Aib
  MISC_FEATURE (40)..(40): PEG (40kDa) covalently attached to Cysteine
  MISC_FEATURE (40)..(40): C-terminal amidation

SEQ ID NO: 1175 - protein, 40 aa, Artificial Sequence; identical to SEQ ID NO: 1121
  Synthetic polypeptide
  MOD_RES (2)..(2): Xaa is Aib
  MOD_RES (16)..(16): Xaa is Aib
  MOD_RES (20)..(20): Xaa is Aib
  MISC_FEATURE (40)..(40): C-terminal amidation

SEQ ID NO: 1176 - protein, 40 aa, Artificial Sequence
  Synthetic polypeptide
  MOD_RES (2)..(2): Xaa is Aib
  MOD_RES (20)..(20): Xaa is Aib
  MISC_FEATURE (40)..(40): C-terminal amidation
YXQGTFTSDYSIYLDEQAAXEFVNWLLAGGPSSGAPPPSC

SEQ ID NO: 1177 - protein, 29 aa, Artificial Sequence
  Synthetic polypeptide
  MOD_RES (2)..(2): Xaa is Aib
  MOD_RES (20)..(20): Xaa is Aib
  MISC_FEATURE (29)..(29): C-terminal amidation
YXQGTFTSDYSIYLDEQAAXEFVCWLLAG

SEQ ID NO: 1178 - protein, 29 aa, Artificial Sequence
  Synthetic polypeptide
  MISC_FEATURE: C-terminal amidation
  MOD_RES (2)..(2): Xaa is Aib
  MOD_RES (20)..(20): Xaa is Aib
YXQGTFTSDYSIYLDSQAAXEFVCWLLAG

SEQ ID NO: 1179 - protein, 30 aa, Artificial Sequence
  Synthetic polypeptide
  MOD_RES (2)..(2): Xaa is Aib
  MISC_FEATURE (24)..(24): PEG (40kDa) covalently attached to Cysteine
HXEGTFTSDVSSYLEEQAAKEFICWLVKGR

SEQ ID NO: 1180 - protein, 42 aa, Artificial Sequence
  Synthetic polypeptide
  MISC_FEATURE (24)..(24): Substituted amino acid covalently linked to hydrophilic group
YAPGTFISDYSIAMDKIHQQDFVXWLLAQKGKKNWLKHNITQ

SEQ ID NO: 1181 - protein, 40 aa, Artificial Sequence
  Synthetic polypeptide
  MOD_RES (2)..(2): Xaa is Aib
  MISC_FEATURE (16)..(20): Lactam bridge between residues 16 and 20
  MISC_FEATURE (40)..(40): Substituted amino acid covalentaly linked to hydrophilic group
YXQGTFTSDYSIYLDEQAAKEFVNWLLAGGPSSGAPPPSX

SEQ ID NO: 1182 - protein, 29 aa, Artificial Sequence
  Synthetic polypeptide
  MOD_RES (2)..(2): Xaa is Aib
  MISC_FEATURE (16)..(20): Lactam bridge between residues 16 and 20
  MISC_FEATURE (24)..(24): Substituted amino acid covalently linked to hydrophilic group
  misc_feature (29)..(29): Xaa can be any naturally occurring amino acid
YXQGTFTSDYSIYLDEQAAKEFVXWLLAX

SEQ ID NO: 1183 - protein, 39 aa, Artificial Sequence
  Synthetic polypeptide
  MOD_RES (2)..(2): Xaa is Aib
  MISC_FEATURE (16)..(20): Lactam bridge between residues 16 and 20
  MISC_FEATURE (24)..(24): Substituted amino acid covalently linked to hydrophilic group
YXQGTFTSDYSIYLDEQAAKEFVXWLLAGGPSSGAPPPS

SEQ ID NO: 1184 - protein, 40 aa, Artificial Sequence
  Synthetic polypeptide
  MOD_RES (2)..(2): Xaa is Aib
  MISC_FEATURE (16)..(20): Lactam bridge between residues 16 and 20
  MISC_FEATURE (40)..(40): Substituted amino acid covalently linked to hydrophilic group
YXEGTFTSDYSIYLDEQAAKEFVNWLLAGGPSSGAPPPSX

SEQ ID NO: 1185 - protein, 29 aa, Artificial Sequence
  Sythetic polypeptide
  MOD_RES (2)..(2): Xaa is Aib
  MISC_FEATURE (16)..(20): Lactam bridge between residues 16 and 20
  MISC_FEATURE (24)..(24): Substituted amino acid covalently linked to hydrophilic group
YXQGTFISDYSIYLDEQAAKEFVXWLLAG

SEQ ID NO: 1186 - protein, 40 aa, Artificial Sequence
  Synthetic polypeptide
  MOD_RES (2)..(2): Xaa is Aib
  MISC_FEATURE (16)..(20): Lactam bridge between residues 16 and 20
  MISC_FEATURE (40)..(40): Substituted amino acid covalently linked to hydrophilic group
YXQGTFISDYSIYLDEQAAKEFVNWLLAGGPSSGAPPPSX

SEQ ID NO: 1187 - protein, 29 aa, Artificial sequence
  Synthetic polypeptide
  MOD_RES (2)..(2): Xaa is Aib
  MISC_FEATURE (16)..(20): Lactam bridge between residues 16 and 20
  MISC_FEATURE (24)..(24): Substituted amino acid covalently linked to hydrophilic group
YXQGTFTSDYSIYLDEQAAKEFVXWLMNG

SEQ ID NO: 1188 - protein, 40 aa, Artificial sequence
  Synthetic polypeptide
  MOD_RES (2)..(2): Xaa is Aib
  MISC_FEATURE (16)..(20): Lactam bridge between residues 16 and 20
  MISC_FEATURE (40)..(40): Substitute amino acid covalently linked to hydrophilic group
YXQGTFVSDYSIYLDEQAAKEFVNWLLAGGPSSGAPPPSX

SEQ ID NO: 1189 - protein, 40 aa, Artificial sequence
  Synthetic polypeptide
  MOD_RES (2)..(2): Xaa is Aib
  MISC_FEATURE (16)..(20): Lactam bridge between residues 16 and 20
  MOD_RES (27)..(27): Xaa is Nle
  MISC_FEATURE (40)..(40): Substituted amino acid covalently linked to hydrophilic group
YXQGTFTSDYSIYLDEQAAKEFVNWLXAGGPSSGAPPPSX

SEQ ID NO: 1190 - protein, 40 aa, Artificial sequence
  Synthetic polypeptide
  MOD_RES (2)..(2): Xaa is Aib
  MISC_FEATURE (16)..(20): Lactam bridge between residues 16 and 20
  MISC_FEATURE (40)..(40): Substituted amino acid covalently linked to hydrophilic group
YXEGTFTSDYSIYLDEQAAKEFVNWLLAGRPSSGAPPPSX

SEQ ID NO: 1191 - protein, 43 aa, Artificial sequence
  Synthetic polypeptide
  MOD_RES (2)..(2): Xaa is Aib
  MISC_FEATURE (16)..(20): Lactam bridge between residues 16 and 20
  MISC_FEATURE (43)..(43): Substituted amino acid covalently linked to hydrophilic group
YXEGTFTSDYSIYLDEQAAKEFVNWLLAGKGKKNWLKHNITQX

SEQ ID NO: 1192 - protein, 40 aa, Artificial Sequence
  Synthetic polypeptide
  MOD_RES (2)..(2): Xaa is Aib
  MOD_RES (20)..(20): Xaa is Aib
  MISC_FEATURE (40)..(40): Substituted amino acid covalently linked to hydrophilic group
  MISC_FEATURE (40)..(40): C-terminal amidation
YXEGTFTSDYSIYLDKQAAXEFVNWLLAGGPSSGAPPPSX

SEQ ID NO: 1193 - protein, 40 aa, Artificial Sequence
  Synthetic polypeptide
  MOD_RES (2)..(2): Xaa is Aib
  MOD_RES (20)..(20): Xaa is Aib
  MISC_FEATURE (24)..(24): Substituted amino acid covalently linked to hydrophilic group
  MISC_FEATURE (40)..(40): C-terminal amidation
YXEGTFTSDYSIYLDKQAAXEFVXWLLAGGPSSGAPPPSK

SEQ ID NO: 1194 - protein, 40 aa, Artificial Sequence
  Synthetic polypeptide
  MOD_RES (2)..(2): Xaa is Aib
  MOD_RES (20)..(20): Xaa is Aib
  MISC_FEATURE (24)..(24): Substituted amino acid covalently linked to hydrophilic group
  MISC_FEATURE (40)..(40): Substitute amino acid covalently linked to an acyl or alkyl group
  MISC_FEATURE (40)..(40): C-terminal amidation
YXEGTFTSDYSIYLDKQAAXEFVXWLLAGGPSSGAPPPSX

SEQ ID NO: 1195 - protein, 40 aa, Artificial Sequence; identical to SEQ ID NO: 1192
  Synthetic polypeptide
  MOD_RES (2)..(2): Xaa is Aib
  MOD_RES (20)..(20): Xaa is Aib
  MISC_FEATURE (40)..(40): Substituted amino acid covalently linked to an acyl or alkyl group
  MISC_FEATURE (40)..(40): C-terminal amidation

SEQ ID NO: 1196 - protein, 40 aa, Artificial Sequence
  Synthetic polypeptide
  MOD_RES (2)..(2): Xaa is Aib
  MOD_RES (20)..(20): Xaa is Aib
  MISC_FEATURE (40)..(40): Substituted amino acid covalently linked to hydrophilic group
  MISC_FEATURE (40)..(40): C-terminal amidation
YXQGTFTSDYSIYLDKQAAXEFVNWLLAGGPSSGAPPPSX

SEQ ID NO: 1197 - protein, 39 aa, Artificial Sequence
  Synthetic polypeptide
  MOD_RES (2)..(2): Xaa is Aib
  MOD_RES (20)..(20): Xaa is Aib
  MISC_FEATURE (24)..(24): Substituted amino acid covalently linked to acyl or alkyl group
  MISC_FEATURE (39)..(39): C-terminal amidation
YXEGTFTSDYSIYLDKQAAXEFVXWLLAGGPSSGAPPPS

SEQ ID NO: 1198 - protein, 39 aa, Artificial Sequence
  Synthetic polypeptide
  MOD_RES (2)..(2): Xaa is Aib
  MISC_FEATURE (10)..(10): Substituted amino acid covalently linked to acyl or alkyl group
  MOD_RES (20)..(20): Xaa is Aib
  MISC_FEATURE (39)..(39): C-terminal amidation
YXEGTFTSDXSIYLDKQAAXEFVNWLLAGGPSSGAPPPS

SEQ ID NO: 1199 - protein, 40 aa, Artificial Sequence; identical to SEQ ID NO: 1196
  Synthetic polypeptide
  MOD_RES (2)..(2): Xaa is Aib
  MOD_RES (20)..(20): Xaa is Aib
  MISC_FEATURE (40)..(40): Substituted amino acid covalently linked to acyl or alkyl group
  MISC_FEATURE (40)..(40): C-terminal amidation

SEQ ID NO: 1200 - protein, 29 aa, Artificial Sequence
  Synthetic polypeptide
  MOD_RES (2)..(2): Xaa is Aib
  MOD_RES (20)..(20): Xaa is Aib
  MISC_FEATURE (24)..(24): Substituted amino acid covalently linked to hydrophilic group
  MISC_FEATURE (29)..(29): C-terminal amidation
YXQGTFTSDYSIYLDKQAAXEFVXWLLAG

SEQ ID NO: 1201 - protein, 29 aa, Artificial Sequence
  Synthetic polypeptide
  MOD_RES (2)..(2): Xaa is Aib
  MISC_FEATURE (10)..(10): Substituted amino acid covalently linked to acyl or alkyl group
  MOD_RES (20)..(20): Xaa is Aib
  MISC_FEATURE (29)..(29): C-terminal amidation
YXEGTFTSDXSIYLDKQAAXEFVNWLLAG

SEQ ID NO: 1202 - protein, 40 aa, Artificial Sequence
  Synthetic polypeptide
  MOD_RES (2)..(2): Xaa is Aib
  MOD_RES (20)..(20): Xaa is Aib
  MISC_FEATURE (40)..(40): Substituted amino acid covalently linked acyl or alkyl group
  MISC_FEATURE (40)..(40): C-terminal amidation
YXQGTFTSDYSIYLDKQAAXEFVCWLLAGGPSSGAPPPSX

SEQ ID NO: 1203 - protein, 40 aa, Artificial Sequence
  Synthetic polypeptide
  MOD_RES (2)..(2): Xaa is Aib
  MOD_RES (20)..(20): Xaa is Aib
  MISC_FEATURE (24)..(24): Substituted amino acid covalently linked to hydrophilic group
  MISC_FEATURE (40)..(40): Substituted amino acid covalently linked to acyl or alkyl group
  MISC_FEATURE (40)..(40): C-terminal amidation
YXQGTFTSDYSIYLDKQAAXEFVXWLLAGGPSSGAPPPSX

SEQ ID NO: 1204 - protein, 40 aa, Artificial Sequence
  Synthetic polypeptide
  MOD_RES (2)..(2): Xaa is Aib
  MOD_RES (20)..(20): Xaa is Aib
  MISC_FEATURE (24)..(24): Substituted amino acid covalently linked to hydrophilic group
  MISC_FEATURE (40)..(40): C-terminal amidation
YXQGTFTSDYSIYLDKQAAXEFVXWLLAGGPSSGAPPPSK

SEQ ID NO: 1205 - protein, 40 aa, Artificial Sequence; identical to SEQ ID NO: 1192
  Synthetic polypeptide
  MOD_RES (2)..(2): Xaa is Aib
  MOD_RES (20)..(20): Xaa is Aib
  MISC_FEATURE (40)..(40): Substituted amino acid covalently linked to hydrophilic group
  MISC_FEATURE (40)..(40): C-terminal amidation

SEQ ID NO: 1206 - protein, 40 aa, Artificial Sequence; identical to SEQ ID NO: 1154
  Synthetic polypeptide
  MOD_RES (2)..(2): Xaa is Aib
  MOD_RES (20)..(20): Xaa is Aib
  MISC_FEATURE (40)..(40): Substituted amino acid covalently linked to acyl or alkyl group
  MISC_FEATURE (40)..(40): C-terminal amidation

SEQ ID NO: 1207 - protein, 40 aa, Artificial Sequence
  Synthetic polypeptide
  MOD_RES (2)..(2): Xaa is Aib
  MOD_RES (20)..(20): Xaa is Aib
  MISC_FEATURE (40)..(40): Substituted amino acid covalently linked to acyl or alkyl group
  MISC_FEATURE (40)..(40): C-terminal amidation
YXQGTFTSDYSIYLDKQAAXEFVCWLMNGGPSSGAPPPSX

SEQ ID NO: 1208 - protein, 40 aa, Artificial Sequence
  Synthetic polypeptide
  MOD_RES (2)..(2): Xaa is Aib
  MOD_RES (20)..(20): Xaa is Aib
  MISC_FEATURE (24)..(24): Substituted amino acid covalently linked to hydrophilic group
  MISC_FEATURE (40)..(40): Substituted amino acid covalently linked to acyl or alkyl group
  MISC_FEATURE (40)..(40): C-terminal amidation
YXQGTFTSDYSIYLDKQAAXEFVXWLMNGGPSSGAPPPSX

SEQ ID NO: 1209 - protein, 40 aa, Artificial Sequence; identical to SEQ ID NO: 1154
  Synthetic polypeptide
  MOD_RES (2)..(2): Xaa is Aib
  MOD_RES (20)..(20): Xaa is Aib
  MISC_FEATURE (40)..(40): Substituted amino acid covalently linked to acyl or alkyl group
  MISC_FEATURE (40)..(40): C-terminal amidation

SEQ ID NO: 1210 - protein, 40 aa, Artificial Sequence; identical to SEQ ID NO: 1196
  Synthetic polypeptide
  MOD_RES (2)..(2): Xaa is Aib
  MOD_RES (20)..(20): Xaa is Aib
  MISC_FEATURE (40)..(40): Substituted amino acid covalently linked to acyl or alkyl group
  MISC_FEATURE (40)..(40): C-terminal amidation

SEQ ID NO: 1211 - protein, 40 aa, Artificial Sequence; identical to SEQ ID NO: 1202
  Synthetic polypeptide
  MOD_RES (2)..(2): Xaa is Aib
  MOD_RES (20)..(20): Xaa is Aib
  MISC_FEATURE (40)..(40): Substituted amino acid covalently linked to acyl or alkyl group
  MISC_FEATURE (40)..(40): C-terminal amidation

SEQ ID NO: 1212 - protein, 40 aa, Artificial Sequence; identical to SEQ ID NO: 1154
  Synthetic polypeptide
  MOD_RES (2)..(2): Xaa is Aib
  MOD_RES (20)..(20): Xaa is Aib
  MISC_FEATURE (40)..(40): Substituted amino acid covalently linked to acyl or alkyl group
  MISC_FEATURE (40)..(40): C-terminal amidation

SEQ ID NO: 1213 - protein, 40 aa, Artificial Sequence; identical to SEQ ID NO: 1193
  Synthetic polypeptide
  MOD_RES (2)..(2): Xaa is Aib
  MOD_RES (20)..(20): Xaa is Aib
  MISC_FEATURE (24)..(24): Substituted amino acid covalently linked to hydrophilic group
  MISC_FEATURE (40)..(40): C-terminal amidation

SEQ ID NO: 1214 - protein, 40 aa, Artificial Sequence; identical to SEQ ID NO: 1154
  Synthetic polypeptide
  MOD_RES (2)..(2): Xaa is Aib
  MOD_RES (20)..(20): Xaa is Aib
  MISC_FEATURE (40)..(40): Substituted amino acid covalently linked to acyl or alkyl group
  MISC_FEATURE (40)..(40): C-terminal amidation

SEQ ID NO: 1215 - protein, 40 aa, Artificial Sequence; identical to SEQ ID NO: 1194
  Synthetic polypeptide
  MOD_RES (2)..(2): Xaa is Aib
  MOD_RES (20)..(20): Xaa is Aib
  MISC_FEATURE (24)..(24): Substituted amino acid covalently linked to hydrophilic group
  MISC_FEATURE (40)..(40): Substituted amino acid covalently linked to acyl or alkyl group
  MISC_FEATURE (40)..(40): C-terminal amidation

SEQ ID NO: 1216 - protein, 40 aa, Artificial Sequence; identical to SEQ ID NO: 1194
  Synthetic polypeptide
  MOD_RES (2)..(2): Xaa is Aib
  MOD_RES (20)..(20): Xaa is Aib
  MISC_FEATURE (24)..(24): Substituted amino acid covalently linked to hydrophilic group
  MISC_FEATURE (40)..(40): C-terminal amidation

SEQ ID NO: 1217 - protein, 39 aa, Artificial Sequence
  Synthetic polypeptide
  MOD_RES (2)..(2): Xaa is Aib
  MISC_FEATURE (10)..(10): Substituted amino acid covalently linked to acyl or alkyl group
  MOD_RES (20)..(20): Xaa is Aib
  MISC_FEATURE (40)..(40): C-terminal amidation
YXEGTFTSDXSIYLDKQAAXEFVCWLLAGGPSSGAPPPS

SEQ ID NO: 1218 - protein, 41 aa, Artificial Sequence
  Synthetic polypeptide
  MOD_RES (2)..(2): Xaa is Aib
  MOD_RES (20)..(20): Xaa is Aib
  MISC_FEATURE (40)..(40): Substituted amino acid covalently linked to acyl or alkyl group
  MISC_FEATURE (41)..(41): C-terminal amidation
YXEGTFTSDYSIYLDKQAAXEFVNWLLAGGPSSGAPPPSXC

SEQ ID NO: 1219 - protein, 39 aa, Artificial Sequence
  Synthetic polypeptide
  MOD_RES (2)..(2): Xaa is Aib
  MISC_FEATURE (10)..(10): Substituted amino acid covalently linked to acyl or alkyl group
  MOD_RES (20)..(20): Xaa is Aib
  MISC_FEATURE (24)..(24): Substituted amino acid covalently linked to hydrophilic group
  MISC_FEATURE (39)..(39): C-terminal amidation
YXEGTFTSDXSIYLDKQAAXEFVXWLLAGGPSSGAPPPS

SEQ ID NO: 1220 - protein, 41 aa, Artificial Sequence
  Synthetic polypeptide
  MOD_RES (2)..(2): Xaa is Aib
  MOD_RES (20)..(20): Xaa is Aib
  MISC_FEATURE (40)..(40): Substituted amino acid covalently linked to acyl or alkyl group
  MISC_FEATURE (41)..(41): Substituted amino acid covalently linked to hydrophilic group
  MISC_FEATURE (41)..(41): C-terminal amidation
YXEGTFTSDYSIYLDKQAAXEFVNWLLAGGPSSGAPPPSXX

SEQ ID NO: 1221 - protein, 41 aa, Artificial Sequence
  Synthetic polypeptide
  MOD_RES (2)..(2): Xaa is Aib
  MOD_RES (20)..(20): Xaa is Aib
  MISC_FEATURE (41)..(41): Substituted amino acid covalently linked to hydrophilic group
  MISC_FEATURE (41)..(41): C-terminal amidation
YXEGTFTSDYSIYLDKQAAXEFVNWLLAGGPSSGAPPPSKX

SEQ ID NO: 1222 - protein, 40 aa, Artificial Sequence
  Synthetic polypeptide
  MOD_RES (2)..(2): Xaa is Aib
  MISC_FEATURE (40)..(40): Substituted amino acid covalently linked to acyl or alkyl group
  MISC_FEATURE (40)..(40): C-terminal amidation
HXQGTFTSDYSKYLDEQAAKEFICWLMNGGPSSGAPPPSX

SEQ ID NO: 1223 - protein, 40 aa, Artificial Sequence; identical to SEQ ID NO: 1194
  Synthetic polypeptide
  MOD_RES (2)..(2): Xaa is Aib
  MOD_RES (20)..(20): Xaa is Aib
  MISC_FEATURE (24)..(24): Substituted amino acid covalently linked to hydrophilic group
  MISC_FEATURE (40)..(40): Substituted amino acid covalently linked to acyl or alkyl group
  MISC_FEATURE (40)..(40): C-terminal amidation

SEQ ID NO: 1224 - protein, 40 aa, Artificial Sequence
  Synthetic polypeptide
  MOD_RES (2)..(2): Xaa is Aib
  MOD_RES (16)..(16): Xaa is Aib
  MISC_FEATURE (40)..(40): Substituted amino acid covalently linked to hydrophilic group
  MISC_FEATURE (40)..(40): C-terminal amidation
YXQGTFTSDYSIYLDXQAAKEFVNWLLAGGPSSGAPPPSX

SEQ ID NO: 1225 - protein, 40 aa, Artificial Sequence
  Synthetic polypeptide
  MOD_RES (2)..(2): Xaa is Aib
  MOD_RES (16)..(16): Xaa is Aib
  MISC_FEATURE (40)..(40): Substituted amino acid covalently linked to hydrophilic group
  MISC_FEATURE (40)..(40): C-terminal amidation
YXQGTFTSDYSIYLDXQAAQEFVNWLLAGGPSSGAPPPSX

SEQ ID NO: 1226 - protein, 30 aa, Artificial Sequence; identical to SEQ ID NO: 1179
  Synthetic polypeptide
  MOD_RES (2)..(2): Xaa is Aib
  MISC_FEATURE (24)..(24): Substituted amino acid covalently linked to hydrophilic group

SEQ ID NO: 1227 - protein, 29 aa, Artificial Sequence
  Synthetic polypeptide
  MOD_RES (2)..(2): Xaa is Aib
  MOD_RES (20)..(20): Xaa is Aib
  MISC_FEATURE (29)..(29): C-terminal amidation
YXQGTFTSDYSIYLDKQAAXEFVNWLLAG

SEQ ID NO: 1228 - protein, 29 aa, Artificial Sequence
  Synthetic polypeptide
  MOD_RES (2)..(2): Xaa is D-Ser, D-Ala, Val, Gly, N-Methyl Ser, N-Methyl Ala, or Aib
  MOD_RES (16)..(16): Xaa is Lys, Glu, Ser, Orn, Dab, Aib or any alpha, alpha-disubstituted amino acid
  MOD_RES (20)..(20): Xaa is any alpha, alpha-disubstituted amino acid
  MOD_RES (27)..(27): Xaa is Ile, Leu, or Nle
  MOD_RES (28)..(28): Xaa is Ala or Gly
  MOD_RES (29)..(29): Xaa is Thr, Ala, or Gly
  MISC_FEATURE (29)..(29): C-terminal amidation
YXQGTFTSDYSIYLDXQAAXEFVNWLXXX

SEQ ID NO: 1229 - protein, 29 aa, Artificial Sequence
  Synthetic polypeptide
  MOD_RES (2)..(2): Xaa is Aib
  MOD_RES (20)..(20): Xaa is Aib
  MISC_FEATURE (29)..(29): C-terminal amidation
YXQGTFTSDYSKYLDKRRAXDFVQWLLAG

SEQ ID NO: 1230 - protein, 29 aa, Artificial Sequence
  Synthetic polypeptide
  MOD_RES (2)..(2): Xaa is D-Ser, DAla, Val, Gly, N-Methyl Ser, N-Methyl Ala, or Aib
  MOD_RES (16)..(16): Xaa is Lys, Glu, Ser, Orn, Dab, Aib or any alpha, alpha-disubstituted amino acid
  MOD_RES (20)..(20): Xaa is any alpha, alpha-disubstituted amino acid
  MOD_RES (27)..(27): Xaa is Ile, Leu, or Nle
  MOD_RES (28)..(28): Xaa is Ala or Gly
  MOD_RES (29)..(29): Xaa is Thr, Ala, or Gly
  MOD_RES (29)..(29): C-terminal amidation
YXQGTFTSDYSKYLDXRRAXDFVQWLXXX

SEQ ID NO: 1231 - protein, 41 aa, Artificial Sequence; identical to SEQ ID NO: 1160
  Synthetic polypeptide
  MISC_FEATURE: Homodimer
  MOD_RES (2)..(2): Xaa is Aib
  MOD_RES (20)..(20): Xaa is Aib
  MISC_FEATURE (40)..(40): 14 Carbon fatty acyl group covalently bound to Lysine
  MOD_RES (40)..(40): C-terminal amidation
  DISULFID (41)..(41): Disulfide bond formed with Cys residue of a second peptide having the same structure.

SEQ ID NO: 1232 - protein, 40 aa, Artificial Sequence
  Synthetic polypeptide
  MOD_RES (2)..(2): Xaa is Aib
  MOD_RES (20)..(20): Xaa is Aib
  MISC_FEATURE (40)..(40): C-terminal amidation
YXQGTFTSDYSIYLDKQAAXEFVNWLMNGGPSSGAPPPSK

SEQ ID NO: 1233 - protein, 40 aa, Artificial Sequence
  Synthetic polypeptide
  MOD_RES (2)..(2): Xaa is Aib
  MOD_RES (20)..(20): Xaa is Aib
  MISC_FEATURE (40)..(40): C-terminal amidation
YXQGTFISDYSIYLDKQAAXEFVNWLLAGGPSSGAPPPSK

SEQ ID NO: 1234 - protein, 40 aa, Artificial Sequence; identical to SEQ ID NO: 1233
  Synthetic polypeptide
  MOD_RES (2)..(2): Xaa is Aib
  MOD_RES (20)..(20): Xaa is Aib
  MISC_FEATURE (40)..(40): 16 Carbon fatty acyl group covalently bound to Lysine
  MISC_FEATURE (40)..(40): C-terminal amidation

SEQ ID NO: 1235 - protein, 40 aa, Artificial Sequence; identical to SEQ ID NO: 1104
  Synthetic polypeptide
  MOD_RES (2)..(2): Xaa is Aib
  MOD_RES (20)..(20): Xaa is Aib
  MISC_FEATURE (40)..(40): 16 Carbon fatty acyl group covalently bound to Lysine via a dipeptide spacer
  MISC_FEATURE (40)..(40): C-terminal amidation

SEQ ID NO: 1236 - protein, 40 aa, Artificial Sequence; identical to SEQ ID NO: 1123
  Synthetic polypeptide
  MOD_RES (2)..(2): Xaa is Aib
  MOD_RES (20)..(20): Xaa is Aib
  MISC_FEATURE (40)..(40): 16 Carbon fatty acyl group covalently bound to Lysine via a dipeptide spacer
  MISC_FEATURE (40)..(40): C-terminal amidation

SEQ ID NO: 1237 - protein, 40 aa, Artificial Sequence
  Synthetic polypeptide
  MOD_RES (2)..(2): Xaa is Aib
  MISC_FEATURE (10)..(10): 16 Carbon fatty acyl group covalently bound to Lysine via dipeptide spacer
  MOD_RES (20)..(20): Xaa is Aib
  MISC_FEATURE (40)..(40): C-terminal amidation
YXEGTFTSDKSIYLDKQAAXEFVNWLLAGGPSSGAPPPSK

SEQ ID NO: 1238 - protein, 41 aa, Artificial Sequence; identical to SEQ ID NO: 1160
  Synthetic polypeptide
  MISC_FEATURE: Homodimer
  MOD_RES (2)..(2): Xaa is Aib
  MOD_RES (20)..(20): Xaa is Aib
  MISC_FEATURE (40)..(40): 14 Carbon fatty acyl group covelently bound to Lysine
  MISC_FEATURE (41)..(41): C-terminal amidation
  MISC_FEATURE (41)..(41): Cys residue covalently attached to 20 kDa PEG which is in turn covalently attached to a Cys residue of a second peptide having the same structure

SEQ ID NO: 1239 - protein, 41 aa, Artificial Sequence; identical to SEQ ID NO: 1160
  Synthetic polypeptide
  MISC_FEATURE: homodimer
  MOD_RES (2)..(2): Xaa is Aib
  MOD_RES (20)..(20): Xaa is Aib
  MISC_FEATURE (40)..(40): 14 Carbon fatty acyl group covalently bound to Lysine
  MISC_FEATURE (41)..(41): PEG (5kDa) covalently bound to Cysteine
  MISC_FEATURE (41)..(41): C-terminal amidation
  MISC_FEATURE (41)..(41): Cys residue covalently attached to 5 kDa PEG which is in turn covalently attached to a Cys residue of a second peptide having the same structure

SEQ ID NO: 1240 - protein, 29 aa, Artificial Sequence
  Synthetic polypeptide
  MOD_RES (3)..(3): Xaa is a Glutamine analog
  MOD_RES (27)..(27): Xaa is Nle
HSXGTFTSDYSKYLDTRRAAEFVAWLXDE

SEQ ID NO: 1241 - protein, 29 aa, Artificial Sequence
  Synthetic polypeptide
  MOD_RES (3)..(3): Xaa is a Glutamine analog
  MOD_RES (16)..(16): Xaa is Aib
HSXGTFTSDYSKYLDXRRAADFVAWLMDE

SEQ ID NO: 1242 - protein, 29 aa, Artificial Sequence
  Synthetic polypeptide
  MOD_RES (27)..(27): Xaa is Nle
HSQGTFTSDYSKYLDTRRAAEFVAWLXDE

SEQ ID NO: 1243 - protein, 29 aa, Artificial Sequence
  Synthetic peptide
  MOD_RES (3)..(3): Xaa is Acetamidomethyl-cysteine
  MOD_RES (27)..(27): Xaa is Nle
HSXGTFTSDYSKYLDTRRAAEFVAWLXDE

SEQ ID NO: 1244 - protein, 29 aa, Artificial Sequence
  Synthetic peptide
  MOD_RES (3)..(3): Xaa is Acetyldiaminobutanoic acid
  MOD_RES (27)..(27): Xaa is Nle
HSXGTFTSDYSKYLDTRRAAEFVAWLXDE

SEQ ID NO: 1245 - protein, 29 aa, Artificial Sequence
  Synthetic polypeptide
  MOD_RES (3)..(3): Xaa is carbamoyldiaminopropanoic acid
  MOD_RES (27)..(27): Xaa is Nle
HSXGTFTSDYSKYLDTRRAAEFVAWLXDE

SEQ ID NO: 1246 - protein, 29 aa, Artificial Sequence
  Synthetic polypeptide
  MOD_RES (3)..(3): Xaa is Methylglutamine
  MOD_RES (27)..(27): Xaa is Nle
HSXGTFTSDYSKYLDTRRAAEFVAWLXDE

SEQ ID NO: 1247 - protein, 29 aa, Artificial Sequence
  Synthetic peptide
  MOD_RES (3)..(3): Xaa is Methionine sulfoxide
  MOD_RES (27)..(27): Xaa is Nle
HSXGTFTSDYSKYLDTRRAAEFVAWLXDE

SEQ ID NO: 1248 - protein, 29 aa, Artificial Sequence
  Synthetic peptide
  MOD_RES (3)..(3): Xaa is Acetylornithine
  MOD_RES (27)..(27): Xaa is Nle
HSXGTFTSDYSKYLDTRRAAEFVAWLXDE

SEQ ID NO: 1249 - protein, 29 aa, Artificial Sequence
  Synthetic polypeptide
  MOD_RES (16)..(16): Xaa is Aib
HSQGTFTSDYSKYLDXRRAADFVAWLMDE

SEQ ID NO: 1250 - protein, 29 aa, Artificial Sequence
  Synthetic polypeptide
  MOD_RES (3)..(3): Xaa is Acetyldiaminobutanoic acid
  MOD_RES (16)..(16): Xaa is Aib
HSXGTFTSDYSKYLDXRRAADFVAWLMDE

SEQ ID NO: 1251 - protein, 29 aa, Artificial Sequence
  Synthetic polypeptide
  MOD_RES (3)..(3): Xaa is Methylglutamine
  MOD_RES (16)..(16): Xaa is Aib
HSXGTFTSDYSKYLDXRRAADFVAWLMDE

SEQ ID NO: 1252 - protein, 29 aa, Artificial Sequence
  Synthetic polypeptide
HSQGTFTSDYSKYLDSRRAQDFVQWLMDT

SEQ ID NO: 1253 - protein, 29 aa, Artificial Sequence
  Synthetic polypeptide
  MOD_RES (3)..(3): Xaa is Acetyldiaminobutanoic acid
  MOD_RES (16)..(16): Xaa is Aib
HSXGTFTSDYSKYLDXRRAADFVAWLLDE

SEQ ID NO: 1254 - protein, 39 aa, Artificial Sequence; identical to SEQ ID NO: 604
  Synthetic polypeptide
  MOD_RES (3)..(3): Xaa is Acetyldiaminobutanoic acid
  MOD_RES (16)..(16): Xaa is Aib
  MISC_FEATURE (39)..(39): C-terminal amidation

SEQ ID NO: 1255 - protein, 29 aa, Artificial Sequence
  Synthetic polypeptide
  MOD_RES (3)..(3): Xaa is Acetyldiaminobutanoic acid
  MOD_RES (16)..(16): Xaa is Aib
HSXGTFTSDYSKYLDXRRASDFVSWLLDE

SEQ ID NO: 1256 - protein, 29 aa, Artificial Sequence
  Synthetic polypeptide
  MOD_RES (3)..(3): Xaa is Acetyldiaminobutanoic acid
  MOD_RES (16)..(16): Xaa is Aib
HSXGTFTSDYSKYLDXRRATDFVTWLLDE

SEQ ID NO: 1257-1258 - skipped (2 entries)

SEQ ID NO: 1259 - protein, 40 aa, Artificial Sequence
  Synthetic peptide
  MOD_RES (2)..(2): Xaa is Aib
  MISC_FEATURE (16)..(20): Lactam bridge links Glu16 and Lys20
  MOD_RES (40)..(40): Epsilon amine of Lys is attached to Ala-Ac-Cys(PEG), wherein the Ac-Cys(PEG) is a Cys residue comprising an alpha amino group capped with an acetyl group (CH3CO) and comprising a 40 kDa PEG covalently attached to its side chain
YXQGTFTSDYSIYLDEQAAKEFVNWLLAGGPSSGAPPPSK

SEQ ID NO: 1260 - protein, 40 aa, Artificial Sequence; identical to SEQ ID NO: 1259
  Synthetic peptide
  MOD_RES (2)..(2): Xaa is Aib
  MISC_FEATURE (16)..(20): Lactam bridge links Glu16 and Lys20
  MOD_RES (40)..(40): Epsilon amine of Lys is attached to Arg-Ac-Cys(PEG), wherein the Ac-Cys(PEG) is a Cys residue comprising an alpha amino group capped with an acetyl group (CH3CO) and comprising a 40 kDa PEG covalently attached to its side chain

SEQ ID NO: 1261 - protein, 40 aa, Artificial Sequence; identical to SEQ ID NO: 1071
  Synthetic peptide
  MOD_RES (2)..(2): Xaa is Aib
  MISC_FEATURE (16)..(20): Lactam bridge links Glu16 and Lys20
  MOD_RES (40)..(40): Cys-PEG covalently linked via thioether linkage

SEQ ID NO: 1262 - protein, 40 aa, Artificial Sequence
  Synthetic peptide
  MOD_RES (2)..(2): Xaa is Aib
HXQGTFTSDYSKYLDERRAQDFVQWLMNTGPSSGAPPPSK

SEQ ID NO: 1263 - protein, 40 aa, Artificial Sequence; identical to SEQ ID NO: 1165
  Synthetic peptide
  MISC_FEATURE: MT-345
  MOD_RES (2)..(2): Xaa is Aib
  MOD_RES (40)..(40): Acylated with a C14 fatty acyl group
  MOD_RES (40)..(40): AMIDATION

SEQ ID NO: 1264 - protein, 40 aa, Artificial Sequence; identical to SEQ ID NO: 1165
  Synthetic peptide
  MISC_FEATURE: MT-346
  MOD_RES (2)..(2): Xaa is Aib
  MOD_RES (40)..(40): AMIDATION

SEQ ID NO: 1265 - protein, 40 aa, Artificial Sequence
  Synthetic peptide
  MISC_FEATURE: MT-347
  MOD_RES (2)..(2): Xaa is Aib
  MOD_RES (16)..(16): Xaa is Aib
  MOD_RES (40)..(40): Acylated with a C14 fatty acyl group
  MOD_RES (40)..(40): AMIDATION
HXQGTFTSDYSKYLDXQAAKEFICWLMNGGPSSGAPPPSK

SEQ ID NO: 1266 - protein, 40 aa, Artificial Sequence; identical to SEQ ID NO: 1265
  Synthetic peptide
  MISC_FEATURE: MT-348
  MOD_RES (2)..(2): Xaa is Aib
  MOD_RES (16)..(16): Xaa is Aib
  MOD_RES (40)..(40): AMIDATION

SEQ ID NO: 1267 - protein, 40 aa, Artificial Sequence; identical to SEQ ID NO: 1165
  Synthetic peptide
  MISC_FEATURE: MT-349
  MOD_RES (2)..(2): Xaa is Aib
  MOD_RES (24)..(24): Covalently bound to 40kDa PEG via thioether made by reaction of peptide with haloacetyl-activated PEG
  MOD_RES (40)..(40): Acylated with a C14 fatty acyl group
  MOD_RES (40)..(40): AMIDATION

SEQ ID NO: 1268 - protein, 40 aa, Artificial Sequence; identical to SEQ ID NO: 1165
  Synthetic peptide
  MISC_FEATURE: MT-350
  MOD_RES (2)..(2): Xaa is Aib
  MOD_RES (24)..(24): Covalently bound to 40kDa PEG via thioether made by reaction of peptide with haloacetyl-activated PEG
  MOD_RES (40)..(40): AMIDATION

SEQ ID NO: 1269 - protein, 40 aa, Artificial Sequence; identical to SEQ ID NO: 1265
  Synthetic peptide
  MISC_FEATURE: MT-351
  MOD_RES (2)..(2): Xaa is Aib
  MOD_RES (16)..(16): Xaa is Aib
  MOD_RES (24)..(24): Covalently bound to 40kDa PEG via thioether made by reaction of peptide with haloacetyl-activated PEG
  MOD_RES (40)..(40): Acylated with a C14 fatty acyl group
  MOD_RES (40)..(40): AMIDATION

SEQ ID NO: 1270 - protein, 40 aa, Artificial Sequence; identical to SEQ ID NO: 1265
  Synthetic peptide
  MISC_FEATURE: MT-352
  MOD_RES (2)..(2): Xaa is Aib
  MOD_RES (16)..(16): Xaa is Aib
  MOD_RES (24)..(24): Covalently bound to 40kDa PEG via thioether made by reaction of peptide with haloacetyl-activated PEG
  MOD_RES (40)..(40): AMIDATION

SEQ ID NO: 1271 - skipped

SEQ ID NO: 1272 - protein, 40 aa, Artificial Sequence
  Synthetic peptide
  MISC_FEATURE: MT-361
  MOD_RES (2)..(2): Xaa is Aib
  MOD_RES (16)..(16): Xaa is Aib
  MOD_RES (40)..(40): AMIDATION
HXQGTFTSDYSIYLDXQAAKEFVNWLMNGGPSSGAPPPSK

SEQ ID NO: 1273 - protein, 40 aa, Artificial Sequence; identical to SEQ ID NO: 1272
  Synthetic peptide
  MISC_FEATURE: MT-362
  MOD_RES (2)..(2): Xaa is Aib
  MOD_RES (16)..(16): Xaa is Aib
  MOD_RES (40)..(40): Acylated with a C16 fatty acyl group
  MOD_RES (40)..(40): AMIDATION

SEQ ID NO: 1274 - protein, 40 aa, Artificial Sequence
  Synthetic peptide
  MISC_FEATURE: MT-363
  MOD_RES (2)..(2): Xaa is Aib
  MOD_RES (40)..(40): AMIDATION
HXQGTFTSDYSKYLDEQAAKEFIAWLMNGGPSSGAPPPSK

SEQ ID NO: 1275 - protein, 40 aa, Artificial Sequence; identical to SEQ ID NO: 1274
  Synthetic peptide
  MISC_FEATURE: MT-364
  MOD_RES (2)..(2): Xaa is Aib
  MOD_RES (40)..(40): Acylated with a C16 fatty acyl group
  MOD_RES (40)..(40): AMIDATION

SEQ ID NO: 1276-1300 - skipped (25 entries)

SEQ ID NO: 1301 - protein, 29 aa, Homo sapiens
HSQGTFTSDYSKYLDSRRAQDFVQWLMNT

SEQ ID NO: 1302 - protein, 28 aa, Artificial Sequence
  Synthetic Polypeptide
  MISC_FEATURE: Glucagon analogue
  MISC_FEATURE (8)..(8): Xaa is aspartic acid, glutamic acid, cysteic acid or homocysteic acid
SQGTFTSXYSKYLDSRRAQDFVQWLMNT

SEQ ID NO: 1303 - protein, 27 aa, Artificial Sequence
  Synthetic Polypeptide
  MISC_FEATURE: Glucagon analogue
  MISC_FEATURE (7)..(7): Xaa is aspartic acid, glutamic acid, cysteic acid or homocysteic acid
QGTFTSXYSKYLDSRRAQDFVQWLMNT

SEQ ID NO: 1304 - protein, 26 aa, Artificial Sequence
  Synthetic Polypeptide
  MISC_FEATURE: Glucagon analogue
  MISC_FEATURE (6)..(6): Xaa is aspartic acid, glutamic acid, cysteic acid or homocysteic acid
GTFTSXYSKYLDSRRAQDFVQWLMNT

SEQ ID NO: 1305 - protein, 25 aa, Artificial Sequence
  Synthetic Polypeptide
  MISC_FEATURE: Glucagon analogue
  MISC_FEATURE (5)..(5): Xaa is aspartic acid, glutamic acid, cysteic acid or homocysteic acid
TFTSXYSKYLDSRRAQDFVQWLMNT

SEQ ID NO: 1306 - protein, 24 aa, Artificial Sequence
  Synthetic Polypeptide
  MISC_FEATURE: Glucagon analogue
  MISC_FEATURE (4)..(4): Xaa is glutamic acid, cysteic acid or homocysteic acid
  MISC_FEATURE (22)..(22): Xaa at position 22 is Met, Leu or Nle
FTSXYSKYLDSRRAQDFVQWLXNT

SEQ ID NO: 1307 - protein, 24 aa, Artificial Sequence
  Synthetic Polypeptide
  MOD_RES (1)..(1): N-terminal amino group replaced with hydroxy group
  MISC_FEATURE (4)..(4): Xaa is aspartic acid, glutamic acid, cysteic acid or homocysteic acid
  MISC_FEATURE (22)..(22): Xaa is Met, Leu or Nle
FTSXYSKYLDSRRAQDFVQWLXNT

SEQ ID NO: 1308 - protein, 24 aa, Artificial Sequence
  Synthetic Polypeptide
  MOD_RES (1)..(1): N-terminal amino group replaced with hydroxy group
  MISC_FEATURE (22)..(22): Xaa is  Met, Leu or Nle
  MOD_RES (24)..(24): C-terminal alpha carboxylate replaced with amide
FTSDYSRYLDSRRAQDFVQWLXNT

SEQ ID NO: 1309 - protein, 24 aa, Artificial Sequence
  Synthetic Polypeptide
  MISC_FEATURE: Glucagon analogue
  MOD_RES (1)..(1): N-terminal amino group replaced with hydroxy group
  MISC_FEATURE (4)..(4): Xaa is aspartic acid, glutamic acid, cysteic acid or homocysteic acid
  MISC_FEATURE (7)..(7): Xaa is Lys or Arg
  MISC_FEATURE (11)..(11): Xaa is Lys, Cys, Orn, homocysteine or acetyl phenyalanine
  MISC_FEATURE (22)..(22): Xaa is Met, Leu or Nle
FTSXYSXYLDXRRAQDFVQWLXNT

SEQ ID NO: 1310 - protein, 24 aa, Artificial Sequence
  Synthetic Polypeptide
  MISC_FEATURE: Glucagon analogue
  MOD_RES (1)..(1): N-terminal amino group replaced with hydroxy group
  MISC_FEATURE (4)..(4): Xaa is aspartic acid, glutamic acid, cysteic acid or homocysteic acid
  MISC_FEATURE (7)..(7): Xaa is is Lys or Arg
  MISC_FEATURE (16)..(16): Xaa is Lys, Cys, Orn, homocysteine or acetyl phenylalanine
  MISC_FEATURE (22)..(22): Xaa is Met, Leu or Nle
FTSXYSXYLDSRRAQXFVQWLXNT

SEQ ID NO: 1311 - protein, 24 aa, Artificial Sequence
  Synthetic Polypetide
  MISC_FEATURE: Glucagon analogue
  MOD_RES (1)..(1): N-terminal amino group replaced with hydroxy group
  MISC_FEATURE (4)..(4): Xaa is aspartic acid, glutamic acid, cysteic acid or homocysteic acid
  MISC_FEATURE (7)..(7): Xaa is Lys or Arg
  MISC_FEATURE (19)..(19): Xaa is Lys, Cys, Orn, homocysteine or acetyl phenylalanine
  MISC_FEATURE (22)..(22): Xaa is Met, Leu or Nle
FTSXYSXYLDSRRAQDFVXWLXNT

SEQ ID NO: 1312 - protein, 24 aa, Artificial Sequence
  Synthetic Polypeptide
  MISC_FEATURE: Glucagon analogue
  MOD_RES (1)..(1): N-terminal amino group replaced with hydroxy group
  MISC_FEATURE (4)..(4): Xaa is aspartic acid, glutamic acid, cysteic acid or homocysteic acid
  MISC_FEATURE (7)..(7): Xaa is Lys or Arg
  MISC_FEATURE (11)..(11): Xaa is Lys, Cys, Orn, homocysteine or acetyl phenylalanine
  MISC_FEATURE (19)..(19): Xaa is Lys, Cys, Orn, homocysteine or acetyl phenylalanine
  MISC_FEATURE (22)..(22): Xaa is Met, Leu or Nle
FTSXYSXYLDXRRAQDFVXWLXNT

SEQ ID NO: 1313 - protein, 24 aa, Artificial Sequence
  Synthetic Polypeptide
  MISC_FEATURE: Glucagon analogue
  MOD_RES (1)..(1): N-terminal amino group replaced with hydroxy group
  MISC_FEATURE (4)..(4): Xaa is aspartic acid, glutamic acid, cysteic acid or homocysteic acid
  MOD_RES (11)..(11): Pegylated
  MISC_FEATURE (22)..(22): Xaa is Met, Leu or Nle
FTSXYSKYLDCRRAQDFVQWLXNT

SEQ ID NO: 1314 - protein, 24 aa, Artificial Sequence
  Synthetic Polypeptide
  MISC_FEATURE: Glucagon analogue
  MOD_RES (1)..(1): N-terminal amino group replaced with hydroxy group
  MISC_FEATURE (4)..(4): Xaa is aspartic acid, glutamic acid, cysteic acid or homocysteic acid
  MOD_RES (19)..(19): Pegylated
  MISC_FEATURE (22)..(22): Xaa is Met, Leu or Nle
FTSXYSKYLDSRRAQDFVCWLXNT

SEQ ID NO: 1315 - protein, 24 aa, Artificial Sequence
  Synthetic Polypeptide
  MISC_FEATURE: Glucagon analogue
  MOD_RES (1)..(1): N-terminal amino group replaced with hydroxy group
  MISC_FEATURE (4)..(4): Xaa is aspartic acid, glutamic acid, cysteic acid or homocysteic acid
  MISC_FEATURE (22)..(22): Xaa is Met, Leu or Nle
  MOD_RES (24)..(24): Pegylated
FTSXYSKYLDSRRAQDFVQWLXNC

SEQ ID NO: 1316 - protein, 24 aa, Artificial Sequence
  Synthetic Polypeptide
  MISC_FEATURE: Glucagon analogue
  MOD_RES (1)..(1): N-terminal amino group replaced with hydroxy group
  MISC_FEATURE (4)..(4): Xaa is aspartic acid, glutamic acid, cysteic acid or homocysteic acid
  MOD_RES (19)..(19): Pegylated
  MISC_FEATURE (22)..(22): Xaa is Met, Leu or Nle
FTSXYSRYLDSRRAQDFVKWLXNT

SEQ ID NO: 1317 - protein, 24 aa, Artificial Sequence
  Synthetic Polypeptide
  MISC_FEATURE: Glucagon analogue
  MOD_RES (1)..(1): N-terminal amino group replaced with hydroxy group
  MISC_FEATURE (4)..(4): Xaa is aspartic acid, glutamic acid, cysteic acid or homocysteic acid
  MOD_RES (11)..(11): Pegylated
  MISC_FEATURE (22)..(22): Xaa is Met, Leu or Nle
FTSXYSKYLDCRRAQDFVCWLXNT

SEQ ID NO: 1318 - protein, 24 aa, Artificial Sequence
  Synthetic Polypeptide
  MISC_FEATURE: Glucagon analogue
  MOD_RES (1)..(1): N-terminal amino group replaced with hydroxy group
  MISC_FEATURE (4)..(4): Xaa is aspartic acid, glutamic acid, cysteic acid or homocysteic acid
  MISC_FEATURE (22)..(22): Xaa is Met, Leu or Nle
  MOD_RES (24)..(24): C-terminal alpha carboxylate replaced with amide
FTSXYSKYLECRRAQDFVQWLXNT

SEQ ID NO: 1319 - protein, 10 aa, Artificial Sequence
  Synthetic Polypeptide
  MISC_FEATURE: Peptide fragment representing the carboxy terminal 10 amino acids of Exendin-4
GPSSGAPPPS

SEQ ID NO: 1320 - protein, 8 aa, Artificial Sequence
  Synthetic Polypeptide
  MISC_FEATURE: Peptide fragment representing the carboxy terminal 8 amino acids of oxyntomodulin
KRNRNNIA

SEQ ID NO: 1321 - protein, 4 aa, Artificial Sequence
  Synthetic Polypeptide
  MISC_FEATURE: Peptide fragment representing the carboxy 4 amino acids of oxyntomodulin carboxy terminus
KRNR

SEQ ID NO: 1322 - protein, 24 aa, Artificial Sequence
  Synthetic Polypeptide
  MISC_FEATURE: Glucagon analogue
  MISC_FEATURE (7)..(7): Xaa is Lys or Arg
  MISC_FEATURE (11)..(11): Xaa is Lys, Cys, Orn, homocycstein or acetyl phenyalanine
  MISC_FEATURE (19)..(19): Xaa is Lys, Cys, Orn, homocycstein or acetyl phenyalanine
FTSRYSXYLDXRRAQDFVXWLMNT

SEQ ID NO: 1323 - protein, 34 aa, Artificial Sequence
  Synthetic Polypeptide
  MISC_FEATURE: Glucagon analogue
  MISC_FEATURE (4)..(4): Xaa is aspartic acid, glutamic acid, cysteic acid or homocysteic acid
  MISC_FEATURE (7)..(7): Xaa is Lys or Arg
  MISC_FEATURE (16)..(16): Xaa is Lys, Cys, Orn, homocysteine or acetyl phenylalanine
  MISC_FEATURE (22)..(22): Xaa is Met, Leu or Nle
FTSXYSXYLDSRRAQXFVQWLXNTGPSSGAPPPS

SEQ ID NO: 1324 - protein, 32 aa, Artificial Sequence
  Synthetic Polypeptide
  MISC_FEATURE: Glucagon analogue
  MISC_FEATURE (4)..(4): Xaa is aspartic acid, glutamic acid, cysteic acid or homocysteic acid
  MISC_FEATURE (7)..(7): Xaa is Lys or Arg
  MISC_FEATURE (19)..(19): Xaa is Lys, Cys, Orn, homocysteine or acetyl phenylalanine
  MOD_RES (19)..(19): Pegylated
  MISC_FEATURE (22)..(22): Xaa is Met, Leu or Nle
FTSXYSXYLDSRRAQDFVXWLXNTKRNRNNIA

SEQ ID NO: 1325 - protein, 34 aa, Artificial Sequence
  Synthetic Polypeptide
  MISC_FEATURE: Glucagon analogue
  MISC_FEATURE (4)..(4): Xaa is aspartic acid, glutamic acid, cysteic acid or homocysteic acid
  MISC_FEATURE (7)..(7): Xaa is Lys or Arg
  MISC_FEATURE (19)..(19): Xaa is Lys, Cys, Orn, homocysteine or acetyl phenylalanine
  MOD_RES (19)..(19): Pegylated
  MISC_FEATURE (22)..(22): Xaa is Met, Leu or Nle
FTSXYSXYLDSRRAQDFVXWLXNTGPSSGAPPPS

SEQ ID NO: 1326 - protein, 32 aa, Artificial Sequence
  Synthetic Polypeptide
  MISC_FEATURE: Glucagon analogue
  MISC_FEATURE (4)..(4): Xaa is aspartic acid, glutamic acid, cysteic acid or homocysteic acid
  MISC_FEATURE (7)..(7): Xaa is Lys or Arg
  MISC_FEATURE (16)..(16): Xaa is Lys, Cys, Orn, homocysteine or acetyl phenylalanine
  MOD_RES (16)..(16): Pegylation
  MISC_FEATURE (22)..(22): Xaa is Met, Leu or Nle
FTSXYSXYLDSRRAQXFVQWLXNTKRNRNNIA

SEQ ID NO: 1327 - protein, 28 aa, Artificial Sequence
  Synthetic Polypeptide
  MISC_FEATURE: Glucagon analogue
  MISC_FEATURE (4)..(4): Xaa is aspartic acid, glutamic acid, cysteic acid or homocysteic acid
  MISC_FEATURE (7)..(7): Xaa is Lys or Arg
  MISC_FEATURE (16)..(16): Xaa is Lys, Cys, Orn, homocysteine or acetyl phenylalanine
  MOD_RES (16)..(16): Pegylated
  MISC_FEATURE (22)..(22): Xaa is Met, Leu or Nle
FTSXYSXYLDSRRAQXFVQWLXNTKRNR

SEQ ID NO: 1328 - protein, 28 aa, Artificial Sequence
  Synthetic Polypeptide
  MISC_FEATURE: Glucagon analogue
  MISC_FEATURE (4)..(4): Xaa is aspartic acid, glutamic acid, cysteic acid or homocysteic acid
  MISC_FEATURE (7)..(7): Xaa is Lys or Arg
  MISC_FEATURE (19)..(19): Xaa is Lys, Cys, Orn, homocysteine or acetyl phenylalanine
  MOD_RES (19)..(19): Pegylated
  MISC_FEATURE (22)..(22): Xaa is Met, Leu or Nle
FTSXYSXYLDSRRAQDFVXWLXNTKRNR

SEQ ID NO: 1329 - protein, 34 aa, Artificial Sequence
  Synthetic Polypeptide
  MISC_FEATURE: Glucagon analogue
  MOD_RES (1)..(1): N-terminal amino group replaced with hydroxy group
  MISC_FEATURE (4)..(4): Xaa is aspartic acid, glutamic acid, cysteic acid or homocysteic acid
  MISC_FEATURE (22)..(22): Xaa is Met, Leu or Nle
FTSXYSKYLDSRRAQDFVQWLXNTGPSSGAPPPS

SEQ ID NO: 1330 - protein, 32 aa, Artificial Sequence
  Synthetic Polypeptide
  MISC_FEATURE: Glucagon analogue
  MOD_RES (1)..(1): N-terminal amino group replaced with hydroxy group
  MISC_FEATURE (4)..(4): Xaa is aspartic acid, glutamic acid, cysteic acid or homocysteic acid
  MISC_FEATURE (22)..(22): Xaa is Met, Leu or Nle
FTSXYSKYLDSRRAQDFVQWLXNTKRNRNNIA

SEQ ID NO: 1331 - protein, 28 aa, Artificial Sequence
  Synthetic Polypeptide
  MISC_FEATURE: Glucagon analogue
  MOD_RES (1)..(1): N-terminal amino group replaced with hydroxy group
  MISC_FEATURE (4)..(4): Xaa is aspartic acid, glutamic acid, cysteic acid or homocysteic acid
  MISC_FEATURE (22)..(22): Xaa is Met, Leu or Nle
FTSXYSKYLDSRRAQCFVQWLXNTKRNR

SEQ ID NO: 1332 - protein, 29 aa, Artificial Sequence
  Synthetic Polypeptide
  MISC_FEATURE: Glucagon analogue
HSQGTFTSDYSKYLDSCRAQDFVQWLMNT

SEQ ID NO: 1333 - protein, 39 aa, Artificial Sequence; identical to SEQ ID NO: 36
  Synthetic Polypeptide
  MISC_FEATURE: Glucagon analogue

SEQ ID NO: 1334 - protein, 29 aa, Artificial Sequence
  Synthetic Polypeptide
  MISC_FEATURE: Glucagon analogue
  MOD_RES (24)..(24): 2-butyrolactone bound through thiol group of Cysteine
HSQGTFTSDYSKYLDSRRAQCFVQWLMNT

SEQ ID NO: 1335 - protein, 29 aa, Artificial Sequence
  Synthetic Polypeptide
  MISC_FEATURE: Glucagon Analogue
  MOD_RES (24)..(24): Carboxymethyl group bound through thiol group of Cysteine
HSQGTFTSDYSKYLDSRRAQCFVQWLMNT

SEQ ID NO: 1336 - protein, 24 aa, Artificial Sequence
  Synthetic Polypeptide
  MISC_FEATURE: Glucagon analogue
  MOD_RES (1)..(1): N-terminal amino group replaced with hydroxy group
  MISC_FEATURE (4)..(4): Xaa is aspartic acid, glutamic acid, cysteic acid or homocysteic acid
  MISC_FEATURE (22)..(22): Xaa is Met, Leu or Nle
FTSXYSKYLESRRAQDFVQWLXNT

SEQ ID NO: 1337 - protein, 24 aa, Artificial Sequence
  Synthetic Polypeptide
  MISC_FEATURE: Glucagon analogue
  MOD_RES (1)..(1): N-terminal amino group replaced with hydroxy group
  MISC_FEATURE (22)..(22): Xaa is Met, Leu or Nle
FTSDYSKYLDSRRAQDFVQWLXNT

SEQ ID NO: 1338 - protein, 24 aa, Artificial Sequence
  Synthetic Polypeptide
  MISC_FEATURE: Glucagon analogue
  MOD_RES (1)..(1): N-terminal amino group replaced with hydroxy group
  MISC_FEATURE (22)..(22): Xaa is Met, Leu or Nle
FTSDYSKYLESRRAQDFVQWLXNT

SEQ ID NO: 1339 - protein, 24 aa, Artificial Sequence
  Synthetic Polypeptide
  MISC_FEATURE: Glucagon analogue
  MISC_FEATURE (1)..(1): N-terminal amino group replaced with hydroxy group
  MISC_FEATURE (4)..(4): Xaa is aspartic acid, glutamic acid, cysteic acid or homocysteic acid
  MISC_FEATURE (22)..(22): Xaa is Met, Leu or Nle
  MISC_FEATURE (23)..(23): Xaa is Asn, Asp, Glu, cysteic acid or homocysteic acid
  MISC_FEATURE (24)..(24): Xaa id Thr, Asp, Glu, cysteic acid or homocysteic acid
FTSXYSKYLDSRRAQDFVQWLXXX

SEQ ID NO: 1340 - protein, 24 aa, Artificial Sequence
  Synthetic Polypeptide
  MISC_FEATURE: Glucagon analogue
  MOD_RES (1)..(1): N-terminal amino group replaced with hydroxy group
  MISC_FEATURE (4)..(4): Xaa is aspartic acid, glutamic acid, cysteic acid or homocysteic acid
  MISC_FEATURE (10)..(10): Xaa is Glu, cysteic acid, homoglutamic acid or homocysteic acid
  MISC_FEATURE (22)..(22): Xaa is Met, Leu or Nle
  MISC_FEATURE (23)..(23): Xaa is Asn or an acidic amino acid
  MISC_FEATURE (24)..(24): Xaa is Thr or an acidic amino acid
FTSXYSKYLXSRRAQDFVQWLXXX

SEQ ID NO: 1341 - protein, 24 aa, Artificial Sequence
  Synthetic Polypeptide
  MISC_FEATURE: Glucagon analogue
  MOD_RES (1)..(1): N-terminal amino group replaced with hydroxy group
  MISC_FEATURE (4)..(4): Xaa is aspartic acid, glutamic acid, cysteic acid or homocysteic acid
  MISC_FEATURE (10)..(10): Xaa is Glu, cysteic acid, homoglutamic acid or homocysteic acid
  MISC_FEATURE (22)..(22): Xaa is Met, Leu or Nle
  MISC_FEATURE (23)..(23): Xaa is Asn, Asp or Glu
  MISC_FEATURE (24)..(24): Xaa is Thr, glu or Asp
FTSXYSKYLXSRRAQDFVQWLXXX

SEQ ID NO: 1342 - protein, 24 aa, Artificial Sequence
  Synthetic Polypeptide
  MISC_FEATURE: Glucagon analogue
  MOD_RES (1)..(1): N-terminal amino group replaced with hydroxy group
  MISC_FEATURE (4)..(4): Xaa is aspartic acid, glutamic acid, cysteic acid or homocysteic acid
  MISC_FEATURE (10)..(10): Xaa is Glu, cysteic acid, homoglutamic acid or homocysteic acid
  MISC_FEATURE (22)..(22): Xaa is Met, Leu or Nle
  MISC_FEATURE (23)..(23): Xaa is Asn or an acidic amino acid
  MISC_FEATURE (24)..(24): Xaa is Thr or an acidic amino acid
FTSXYSKYLXSRRAQDFVQWLXXX

SEQ ID NO: 1343 - protein, 24 aa, Artificial Sequence
  Synthetic Polypeptide
  MISC_FEATURE: Glucagon analogue
  MOD_RES (1)..(1): N-terminal amino group replaced with hydroxy group
  MISC_FEATURE (4)..(4): Xaa is aspartic acid, glutamic acid, cysteic acid or homocysteic acid
  MISC_FEATURE (10)..(10): Xaa is Asp, Glu, cysteic acid, homoglutamic acid or homocysteic acid
  MOD_RES (11)..(11): 20kDa PEG group attached to Xaa at position 11
  MISC_FEATURE (22)..(22): Xaa is Met, Leu or Nle
  MISC_FEATURE (23)..(23): Xaa is Asn or an acidic amino acid
  MISC_FEATURE (24)..(24): Xaa is Thr or an acidic amino acid
FTSXYSKYLXCRRAQDFVQWLXXX

SEQ ID NO: 1344 - protein, 24 aa, Artificial Sequence
  Synthetic Polypeptide
  MISC_FEATURE: Glucagon analogue
  MOD_RES (1)..(1): N-terminal amino group replaced with hydroxy group
  MISC_FEATURE (4)..(4): Xaa is aspartic acid, glutamic acid, cysteic acid or homocysteic acid
  MISC_FEATURE (10)..(10): Xaa is Asp, Glu, cysteic acid, homoglutamic acid or homocysteic acid
  MOD_RES (16)..(16): 20kDa PEG group attached to Xaa at position 16
  MISC_FEATURE (22)..(22): Xaa is Met, Leu or Nle
  MISC_FEATURE (23)..(23): Xaa is Asn or an acidic amino acid
  MISC_FEATURE (24)..(24): Xaa is Thr or an acidic amino acid
FTSXYSKYLXSRRAQCFVQWLXXX

SEQ ID NO: 1345 - protein, 24 aa, Artificial Sequence
  Synthetic Polypeptide
  MISC_FEATURE: Glucagon analogue
  MOD_RES (1)..(1): N-terminal amino group replaced with hydroxy group
  MISC_FEATURE (4)..(4): Xaa is aspartic acid, glutamic acid, cysteic acid or homocysteic acid
  MISC_FEATURE (10)..(10): Xaa is Asp, Glu, cysteic acid, homoglutamic acid or homocysteic acid
  MOD_RES (19)..(19): Pegylated
  MISC_FEATURE (22)..(22): Xaa is Met, Leu or Nle
  MISC_FEATURE (23)..(23): Xaa is Asn or an acidic amino acid
  MISC_FEATURE (24)..(24): Xaa is Thr or an acidic amino acid
FTSXYSKYLXSRRAQDFVCWLXXX

SEQ ID NO: 1346 - protein, 35 aa, Artificial Sequence
  Synthetic Polypeptide
  MISC_FEATURE: Glucagon analogue
  MOD_RES (1)..(1): N-terminal amino group replaced with hydroxy group
  MISC_FEATURE (4)..(4): Xaa is aspartic acid, glutamic acid, cysteic acid or homocysteic acid
  MISC_FEATURE (10)..(10): Xaa is Asp, Glu, cysteic acid, homoglutamic acid or homocysteic acid
  MISC_FEATURE (22)..(22): Xaa is Met, Leu or Nle
  MISC_FEATURE (23)..(23): Xaa is Asn or an acidic amino acid
  MISC_FEATURE (24)..(24): Xaa is Thr or an acidic amino acid
  MISC_FEATURE (25)..(25): Xaa is Lys, Cys, Orn, homocycstein or acetyl phenyalanine
  MOD_RES (25)..(25): Pegylated
FTSXYSKYLXSRRAQDFVQWLXXXXGPSSGAPPPS

SEQ ID NO: 1347 - protein, 35 aa, Artificial Sequence
  Synthetic Polypeptide
  MISC_FEATURE: Glucagon analogue
  MOD_RES (1)..(1): N-terminal amino group replaced with hydroxy group
  MISC_FEATURE (4)..(4): Xaa is aspartic acid, glutamic acid, cysteic acid or homocysteic acid
  MISC_FEATURE (10)..(10): Xaa is Asp, Glu, cysteic acid, homoglutamic acid or homocysteic acid
  MISC_FEATURE (22)..(22): Xaa is Met, Leu or Nle
  MISC_FEATURE (23)..(23): Xaa is Asn or an acidic amino acid
  MISC_FEATURE (24)..(24): Xaa is Thr or an acidic amino acid
  MISC_FEATURE (35)..(35): Xaa is Lys, Cys, Orn, homocysteine or acetyl phenyalanine
  MOD_RES (35)..(35): Pegylated
FTSXYSKYLXSRRAQDFVQWLXXXGPSSGAPPPSX

SEQ ID NO: 1348 - protein, 39 aa, Artificial Sequence; identical to SEQ ID NO: 39
  Synthetic Polypeptide
  MISC_FEATURE: Glucagon analogue

SEQ ID NO: 1349 - protein, 35 aa, Artificial Sequence
  Synthetic Polypeptide
  MISC_FEATURE: Glucagon analogue
  MOD_RES (1)..(1): N-terminal amino group replaced with hydroxy group
  MISC_FEATURE (4)..(4): Xaa is aspartic acid, glutamic acid, cysteic acid or homocysteic acid
  MISC_FEATURE (7)..(7): Xaa is Lys or Arg
  MISC_FEATURE (22)..(22): Xaa is Met , Leu or Nle
  MISC_FEATURE (35)..(35): Xaa is Lys, Cys, Orn, homocysteine or acetyl phenyalanine
  MOD_RES (35)..(35): Pegylated
FTSXYSXYLDSRRAQDFVQWLXNTGPSSGAPPPSX

SEQ ID NO: 1350 - protein, 24 aa, Artificial Sequence
  Synthetic Polypeptide
  MISC_FEATURE: Glucagon analogue
  MOD_RES (1)..(1): N-terminal amino group replaced with hydroxy group
FTSEYSKYLDSRRAQDFVQWLMNT

SEQ ID NO: 1351 - protein, 20 aa, Artificial Sequence
  Synthetic Polypeptide
  MISC_FEATURE: Glucagon analogue
YSKYLDSRRAQDFVQWLMNT

SEQ ID NO: 1352 - protein, 24 aa, Artificial Sequence
  Synthetic Polypeptide
  MISC_FEATURE: Glucagon analogue
  MISC_FEATURE (4)..(4): Xaa is Homocysteic acid
FTSXYSKYLDSRRAQDFVQWLMNT

SEQ ID NO: 1353 - protein, 11 aa, Artificial Sequence
  Synthetic Polypeptide
  MISC_FEATURE: Peptide fragment representing the carboxy terminal 10 amino acids of Exendin-4
  MISC_FEATURE (11)..(11): Xaa is Lys, Cys, Orn, homocysteine or acetyl phenyalanine
GPSSGAPPPSX

SEQ ID NO: 1354 - protein, 6 aa, Artificial Sequence
  Synthetic Polypeptide
  MISC_FEATURE (6)..(6): Xaa is phenyl lactic acid
HSQGTX

SEQ ID NO: 1355 - protein, 5 aa, Artificial Sequence
  Synthetic Polypeptide
  MISC_FEATURE (5)..(5): Xaa is phenyl lactic acid
SQGTX

SEQ ID NO: 1356 - protein, 4 aa, Artificial Sequence
  Synthetic Polypeptide
  MISC_FEATURE (4)..(4): Xaa is phenyl lactic acid
QGTX

SEQ ID NO: 1357 - protein, 3 aa, Artificial Sequence
  Synthetic Polypeptide
  MISC_FEATURE (3)..(3): Xaa is phenyl lactic acid
GTX

SEQ ID NO: 1358 - protein, 2 aa, Artificial Sequence
  Synthetic Polypeptide
  MISC_FEATURE (2)..(2): Xaa is phenyl lactic acid
TX

SEQ ID NO: 1359 - protein, 6 aa, Artificial Sequence
  Synthetic Polypeptide
  MISC_FEATURE (1)..(1): Xaa is selected from a group consisting of His, D-histidine, alpha, alpha-dimethyl imidiazole acetic acid (DMIA), N-methyl histidine, alpha-methyl histidine, imidazole acetic acid, desaminohistidine, hydroxyl-histidine, acetyl-histidine and
  MISC_FEATURE (2)..(2): Xaa is selected from a group consisting of Ser, D-serine, D-alanine, Val, Gly, N-methyl serine, N-methyl alanine, and aminoisobutyric acid (AIB)
  MISC_FEATURE (3)..(3): Xaa is selected from a group consisting of Glu or Gln
  MISC_FEATURE (6)..(6): Xaa is phenyl lactic acid
XXXGTX

SEQ ID NO: 1360 - protein, 5 aa, Artificial Sequence
  Synthetic Polypeptide
  MISC_FEATURE (1)..(1): Xaa is selected from a group consisting of Ser, D-serine, D-alanine, Val, Gly, N-methyl serine, N-methyl alanine, and aminoisobutyric acid (AIB)
  MISC_FEATURE (2)..(2): Xaa is selected from a group consisting of Glu or Gln
  MISC_FEATURE (5)..(5): Xaa is phenyl lactic acid
XXGTX

SEQ ID NO: 1361 - protein, 4 aa, Artificial Sequence
  Synthetic Polypeptide
  MISC_FEATURE (1)..(1): Xaa is selected from a group consisting of Glu and Gln
  MISC_FEATURE (4)..(4): Xaa is phenyl lactic acid
XGTX

SEQ ID NO: 1362 - protein, 24 aa, Artificial Sequence
  Synthetic Polypeptide
  MOD_RES (1)..(1): N-terminal amino group replaced with hydroxy group
  MOD_RES (24)..(24): C-terminal alpha carboxylate optionally replaced with amide
FTSDYSKYLDSRRAQDFVQWLMDT

SEQ ID NO: 1363 - protein, 28 aa, Artificial Sequence
  Synthetic Polypeptide
  MOD_RES (28)..(28): C-terminal alpha carboxylate optionally replaced with amide
SQGTFTSEYSKYLDSRRAQDFVQWLMNT

SEQ ID NO: 1364 - protein, 28 aa, Artificial Sequence
  Synthetic Polypeptide
  MISC_FEATURE (4)..(5): Threonine in position 4 and phenyl lactic acid in position 5 linked via ester bond
  MISC_FEATURE (5)..(5): Xaa is phenyl lactic acid
  MOD_RES (28)..(28): Optional C-terminal alpha carboxylate replaced with amide
  MOD_RES (28)..(28): C-terminal alpha carboxylate optionally replaced with amide
SQGTXTSEYSKYLDSRRAQDFVQWLMNT

SEQ ID NO: 1365 - protein, 29 aa, Artificial Sequence
  Synthetic Polypeptide
  MISC_FEATURE (5)..(6): Threonine in position 5 and phenyl lactic acid in position 6 linked via ester bond
  MISC_FEATURE (6)..(6): Xaa is phenyl lactic acid
  MOD_RES (29)..(29): C-terminal alpha carboxylate optionally replaced with amide
HSQGTXTSEYSKYLDSRRAQDFVQWLMNT

SEQ ID NO: 1366 - protein, 24 aa, Artificial Sequence
  Synthetic Polypeptide
  MOD_RES (1)..(1): N-terminal amino group replaced with hydroxy group
  MISC_FEATURE (11)..(11): Xaa is amino isobutyric acid
FTSDYSKYLDXRRAQDFVQWLMNT

SEQ ID NO: 1367 - protein, 24 aa, Artificial Sequence
  Synthetic Polypeptide
  MOD_RES (1)..(1): N-terminal amino group replaced with hydroxy group
FTSDYSKYLDERRAQDFVQWLMNT

SEQ ID NO: 1368 - protein, 6 aa, Artificial Sequence
  Synthetic Polypeptide
  MISC_FEATURE (1)..(1): Xaa is selected from a group consisting of His, D-histidine, alpha, alpha-dimethyl imidiazole acetic acid (DMIA), N-methyl histidine, alpha-methyl histidine, imidazole acetic acid, desaminohistidine, hydroxyl-histidine, acetyl-histidine and
  MISC_FEATURE (2)..(2): Xaa is selected from a group consisting of Ser, D-serine, D-alanine, Val, Gly, N-methyl serine, N-methyl alanine, and aminoisobutyric acid (AIB)
  MISC_FEATURE (3)..(3): Xaa is selected from a group consisting of Glu or Gln
XXXTGF

SEQ ID NO: 1369 - protein, 5 aa, Artificial Sequence
  Synthetic Polypeptide
  MISC_FEATURE (1)..(1): Xaa is selected from a group consisting of Ser, D-serine, D-alanine, Val, Gly, N-methyl serine, N-methyl alanine, and aminoisobutyric acid (AIB)
  MISC_FEATURE (2)..(2): Xaa is selected from a group consisting of Glu or Gln
XXTGF

SEQ ID NO: 1370 - protein, 4 aa, Artificial Sequence
  Synthetic Polypeptide
  MISC_FEATURE (1)..(1): Xaa is selected from a group consisting of Glu or Gln
XTGF

SEQ ID NO: 1371 - protein, 24 aa, Artificial Sequence
  Synthetic Polypeptide
  MOD_RES (1)..(1): N-terminal amino group replaced with hydroxy group
  MISC_FEATURE (24)..(24): C-terminal alpha carboxylate optionally replaced with an amide
FTSEYSKYLDSRRAQDFVQWLMNT

SEQ ID NO: 1372-1400 - skipped (29 entries)

SEQ ID NO: 1401 - protein, 29 aa, Homo sapiens
HSQGTFTSDYSKYLDSRRAQDFVQWLMNT

SEQ ID NO: 1402 - protein, 24 aa, Artificial Sequence
  Synthetic Polypeptide
  MISC_FEATURE: Glucagon analogue
  MOD_RES (1)..(1): N-terminal amino group replaced with hydroxy group
FTSDYSKYLDSRRAQDFVQWLMNT

SEQ ID NO: 1403 - protein, 31 aa, Homo sapiens; identical to SEQ ID NO: 50

SEQ ID NO: 1404 - protein, 30 aa, Homo sapiens; identical to SEQ ID NO: 52

SEQ ID NO: 1405 - protein, 24 aa, Artificial Sequence
  Synthetic Polypeptide
  MISC_FEATURE: Glucagon analogue
  MOD_RES (1)..(1): N-terminal amino group replaced with hydroxy group
FTSDYSKYLDERRAQDFVQWLMNT

SEQ ID NO: 1406 - protein, 24 aa, Artificial Sequence
  Synthetic Polypeptide
  MOD_RES (1)..(1): N-terminal amino group replaced with hydroxy group
FTSDYSKYLDERRAKDFVQWLMNT

SEQ ID NO: 1407 - protein, 24 aa, Artificial Sequence
  Synthetic Polypeptide
  MISC_FEATURE: Glucagon analogue
  MOD_RES (1)..(1): N-terminal amino group replaced with hydroxy group
  MISC_FEATURE (11)..(11): Xaa is Ser or Glu
FTSDYSKYLDXRRAKDFVEWLMNT

SEQ ID NO: 1408 - protein, 24 aa, Artificial Sequence
  Synthetic Polypeptide
  MISC_FEATURE: Glucagon analogue
  MOD_RES (1)..(1): N-terminal amino group replaced with hydroxy group
  MISC_FEATURE (11)..(11): Xaa is Ser or Glu
FTSDYSKYLDXRRAQDFVEWLMKT

SEQ ID NO: 1409 - protein, 24 aa, Artificial Sequence
  Synthetic Polypeptide
  MISC_FEATURE: Glucagon analogue
  MOD_RES (1)..(1): N-terminal amino group replaced with hydroxy group
  MISC_FEATURE (7)..(7): Xaa at position 7 is Lys or Glu
  MISC_FEATURE (10)..(10): Xaa is Asp, Glu, homoglutamic acid, cysteic acid or homocysteic acid
  MISC_FEATURE (11)..(11): Xaa is Ala, Ser, Glu, Lys, homoglutamic acid or homocysteic acid
  MISC_FEATURE (15)..(15): Xaa is Gln, Glu or Lys
  MISC_FEATURE (19)..(19): Xaa is Ala, Gln, Lys or Glu
  MISC_FEATURE (23)..(23): Xaa is Asn, Lys or an acidic amino acid
  MISC_FEATURE (24)..(24): Xaa is Thr or an acidic amino acid
FTSDYSXYLXXRRAXDFVXWLMXX

SEQ ID NO: 1410 - protein, 24 aa, Artificial Sequence
  Synthetic Polypeptide
  MISC_FEATURE: Glucagon analogue
  MOD_RES (1)..(1): N-terminal amino group replaced with hydroxy group
  MISC_FEATURE (11)..(11): Xaa is Ala, Ser, Glu, Gln, homoglutamic acid or homocysteic acid
  MISC_FEATURE (15)..(15): Xaa is Gln or Lys
  MISC_FEATURE (19)..(19): Xaa is Ala, Gln or Glu
  MISC_FEATURE (23)..(23): Xaa is Asn, Lys or an acidic amino acid
FTSDYSKYLDXRRAXDFVXWLMXT

SEQ ID NO: 1411 - protein, 24 aa, Artificial Sequence
  Synthetic Polypeptide
  MISC_FEATURE: Glucagon analogue
  MOD_RES (1)..(1): N-terminal amino group replaced with hydroxy group
  MISC_FEATURE (11)..(11): Xaa is Ala, Ser, Glu, Gln, homoglutamic acid or homocysteic acid
  MISC_FEATURE (15)..(15): Xaa is Gln or Lys
FTSDYSKYLDXRRAXDFVQWLMNT

SEQ ID NO: 1412 - protein, 24 aa, Artificial Sequence
  Synthetic Polypeptide
  MISC_FEATURE: Glucagon analogue
  MOD_RES (1)..(1): N-terminal amino group replaced with hydroxy group
  MISC_FEATURE (4)..(4): Xaa is aspartic acid, glutamic acid, cysteic acid or homocysteic acid
  MISC_FEATURE (7)..(7): Xaa is Lys or Arg
  MISC_FEATURE (15)..(15): Xaa is Lys or Gln
  MISC_FEATURE (16)..(16): Xaa is Lys, Cys, Orn, homocysteine or acetyl phenyalanine
  MOD_RES (16)..(16): Pegylated
  MISC_FEATURE (19)..(19): Xaa is Lys, Cys, Orn, homocysteine or acetyl phenylalanine
  MOD_RES (19)..(19): Pegylated
  MISC_FEATURE (22)..(22): Xaa is Met, Leu or Nle
FTSXYSXYLDERRAXXFVXWLXNT

SEQ ID NO: 1413 - protein, 24 aa, Artificial Sequence
  Synthetic Polypeptide
  MISC_FEATURE: Glucagon analogue
  MOD_RES (1)..(1): N-terminal amino group replaced with hydroxy group
  MISC_FEATURE (4)..(4): Xaa is aspartic acid, glutamic acid, cysteic acid or homocysteic acid
  MISC_FEATURE (15)..(15): Xaa is Lys or Gln
  MISC_FEATURE (16)..(16): Xaa is Cys, Orn, homocysteine or acetyl phenyalanine
  MOD_RES (16)..(16): Pegylated
  MISC_FEATURE (22)..(22): Xaa is Met, Leu or Nle
FTSXYSKYLDERRAXXFVQWLXNT

SEQ ID NO: 1414 - protein, 24 aa, Artificial Sequence
  Synthetic Polypeptide
  MISC_FEATURE: Glucagon analogue
  MOD_RES (1)..(1): N-terminal amino group replaced with hydroxy group
  MISC_FEATURE (4)..(4): Xaa is aspartic acid, glutamic acid, cysteic acid or homocysteic acid
  MISC_FEATURE (15)..(15): Xaa is Lys or Gln
  MISC_FEATURE (19)..(19): Xaa is Cys, Orn, homocysteine or acetyl phenylalanine
  MOD_RES (19)..(19): Pegylated
  MISC_FEATURE (22)..(22): Xaa is Met, Leu or Nle
FTSXYSKYLDERRAXDFVXWLXNT

SEQ ID NO: 1415 - protein, 24 aa, Artificial Sequence
  Synthetic Polypeptide
  MISC_FEATURE: Glucagon analogue
  MOD_RES (1)..(1): N-terminal amino group replaced with hydroxy group
  MISC_FEATURE (4)..(4): Xaa is aspartic acid, glutamic acid, cysteic acid, homoglutamic acid or homocysteic acid
  MISC_FEATURE (7)..(7): Xaa is Lys or Glu
  MISC_FEATURE (10)..(10): Xaa is Asp, Glu, cysteic acid, homoglutamic acid or homocysteic acid
  MISC_FEATURE (11)..(11): Xaa is Ala, Ser, Glu, Lys Gln, homoglutamic acid or homocysteic acid
  MISC_FEATURE (15)..(15): Xaa is Arg, Gln, Glu or Lys
  MISC_FEATURE (19)..(19): Xaa is Ala, Gln, Lys or Glu
  MISC_FEATURE (22)..(22): Xaa is Met, Leu or Nle
  MISC_FEATURE (23)..(23): Xaa is Asn, Lys or an acidic amino acid
  MISC_FEATURE (24)..(24): Xaa is Thr or an acidic amino acid
FTSXYSXYLXXRRAXDFVXWLXXX

SEQ ID NO: 1416 - protein, 24 aa, Artificial Sequence
  Synthetic Polypeptide
  MISC_FEATURE: Glucagon analogue
  MOD_RES (1)..(1): N-terminal amino group replaced with hydroxy group
  MISC_FEATURE (7)..(11): Lactam bridge connecting residues 7 and 11
  MISC_FEATURE (10)..(10): Xaa is Glu or Asp
  MISC_FEATURE (22)..(22): Xaa is Met, Leu or Nle
  MISC_FEATURE (23)..(23): Xaa is Asn, Asp or Glu
  MOD_RES (24)..(24): C-terminal alpha carboxylate replaced with amide
FTSDYSKYLXERRAQDFVQWLXXT

SEQ ID NO: 1417 - protein, 24 aa, Artificial Sequence
  Synthetic Polypeptide
  MISC_FEATURE: Glucagon analogue
  MOD_RES (1)..(1): N-terminal amino group replaced with hydroxy group
  MISC_FEATURE (10)..(10): Xaa is Asp or Glu
  MISC_FEATURE (11)..(15): Lactam bridge connecting residues 11 and 15
  MISC_FEATURE (22)..(22): Xaa is Met, Leu or Nle
  MISC_FEATURE (23)..(23): Xaa is Asn, Asp or Glu
  MOD_RES (24)..(24): C-terminal alpha carboxylate replaced with amide
FTSDYSKYLXERRAKDFVQWLXXT

SEQ ID NO: 1418 - protein, 24 aa, Artificial Sequence
  Synthetic Polypeptide
  MISC_FEATURE: Glucagon analogue
  MOD_RES (1)..(1): N-terminal amino group replaced with hydroxy group
  MISC_FEATURE (10)..(10): Xaa is Asp or Glu
  MISC_FEATURE (11)..(11): Xaa is Ser or Glu
  MISC_FEATURE (15)..(19): Lactam bridge connecting residues 15 and 19
  MISC_FEATURE (22)..(22): Xaa is Met, Leu or Nle
  MISC_FEATURE (23)..(23): Xaa is Asn, Asp or Glu
  MOD_RES (24)..(24): C-terminal alpha carboxylate replaced with amide
FTSDYSKYLXXRRAKDFVEWLXXT

SEQ ID NO: 1419 - protein, 24 aa, Artificial Sequence
  Synthetic Polypeptide
  MISC_FEATURE: Glucagon analogue
  MOD_RES (1)..(1): N-terminal amino group replaced with hydroxy group
  MISC_FEATURE (10)..(10): Xaa is Asp or Glu
  MISC_FEATURE (11)..(11): Xaa is Ser or Glu
  MISC_FEATURE (19)..(23): Lactam bridge connecting residues 19 and 23
  MISC_FEATURE (22)..(22): Xaa is Met, Leu or Nle
  MISC_FEATURE (24)..(24): Xaa is Thr or Glu
  MOD_RES (24)..(24): C-terminal alpha carboxylate replaced with amide
FTSDYSKYLXXRRAQDFVEWLXKX

SEQ ID NO: 1420 - protein, 24 aa, Artificial Sequence
  Synthetic Polypeptide
  MISC_FEATURE: Glucagon analogue
  MOD_RES (1)..(1): N-terminal amino group replaced with hydroxy group
  MISC_FEATURE (4)..(4): Xaa is aspartic acid, glutamic acid, cysteic acid or homocysteic acid
  MISC_FEATURE (7)..(7): Xaa is Lys or Glu
  MISC_FEATURE (10)..(10): Xaa is Asp, Glu, cysteic acid, homoglutamic acid or homocysteic acid
  MISC_FEATURE (11)..(11): Xaa is Ala, Ser, Glu, Lys Gln, homoglutamic acid or homocysteine
  MISC_FEATURE (15)..(15): Xaa is Arg, Gln, Glu or Lys
  MISC_FEATURE (19)..(19): Xaa is Ala, Gln, Lys or Glu
  MISC_FEATURE (22)..(22): Xaa is Met, Leu or Nle
  MISC_FEATURE (23)..(23): Xaa is Asn, Lys, Asp, Glu, cysteic acid or homocysteic acid
  MISC_FEATURE (24)..(24): Xaa is Thr, Asp, Glu, cysteic acid and homocysteic acid
FTSXYSXYLXXRRAXDFVXWLXXX

SEQ ID NO: 1421 - protein, 10 aa, Artificial Sequence
  Synthetic Polypeptide
  MISC_FEATURE: Peptide fragment representing the carboxy terminal 10 amino acids of Exendin-4
GPSSGAPPPS

SEQ ID NO: 1422 - protein, 24 aa, Artificial Sequence
  Synthetic Polypeptide
  MISC_FEATURE: Glucagon analogue
  MOD_RES (1)..(1): N-terminal amino group replaced with hydroxy group
  MISC_FEATURE (4)..(4): Xaa is aspartic acid, glutamic acid, cysteic acid or homocysteic acid
  MISC_FEATURE (7)..(11): Lactam bridge connecting residues 7 and 11
  MISC_FEATURE (10)..(10): Xaa is Asp, Glu, cysteic acid, homoglutamic acid and homocysteic acid
  MISC_FEATURE (22)..(22): Xaa is Met, Leu or Nle
FTSXYSKYLXERRAQDFVQWLXNT

SEQ ID NO: 1423 - protein, 24 aa, Artificial Sequence
  Synthetic Polypeptide
  MISC_FEATURE: Glucagon analogue
  MOD_RES (1)..(1): N-terminal amino group replaced with hydroxy group
  MISC_FEATURE (4)..(4): Xaa is aspartic acid, glutamic acid, cysteic acid or homocysteic acid
  MISC_FEATURE (10)..(10): Xaa is Asp, Glu, cysteic acid, homoglutamic acid and homocysteic acid
  MISC_FEATURE (11)..(15): Lactam bridge connecting residues 11 and 15
  MISC_FEATURE (22)..(22): Xaa is Met, Leu or Nle
FTSXYSKYLXERRAKDFVQWLXNT

SEQ ID NO: 1424 - protein, 24 aa, Artificial Sequence
  Synthetic Polypeptide
  MISC_FEATURE: Glucagon analogue
  MOD_RES (1)..(1): N-terminal amino group replaced with hydroxy group
  MISC_FEATURE (4)..(4): Xaa is aspartic acid, glutamic acid, cysteic acid or homocysteic acid
  MISC_FEATURE (10)..(10): Xaa is Asp, Glu, cysteic acid, homoglutamic acid and homocysteic acid
  MISC_FEATURE (15)..(19): Lactam bridge connecting residues 15 and 19
  MISC_FEATURE (22)..(22): Xaa is Met, Leu or Nle
FTSXYSKYLXERRAKDFVEWLXNT

SEQ ID NO: 1425 - protein, 24 aa, Artificial Sequence
  Synthetic Polypeptide
  MISC_FEATURE: Glucagon analogue
  MOD_RES (1)..(1): N-terminal amino group replaced with hydroxy group
  MISC_FEATURE (4)..(4): Xaa is aspartic acid, glutamic acid, cysteic acid or homocysteic acid
  MISC_FEATURE (10)..(10): Xaa is Asp, Glu, cysteic acid, homoglutamic acid and homocysteic acid
  MISC_FEATURE (19)..(24): Lactam bridge connecting residues 19 and 24
  MISC_FEATURE (22)..(22): Xaa is Met, Leu or Nle
FTSXYSKYLXERRAQDFVEWLXKT

SEQ ID NO: 1426 - protein, 8 aa, Artificial Sequence
  Synthetic Polypeptide
  MISC_FEATURE: Peptide fragment representing the carboxy terminal 8 amino acids of oxyntomodulin
KRNRNNIA

SEQ ID NO: 1427 - protein, 4 aa, Artificial Sequence
  Synthetic Polypeptide
  MISC_FEATURE: Peptide fragment representing the carboxy 4 amino acids of oxyntomodulin carboxy terminus
KRNR

SEQ ID NO: 1428 - protein, 34 aa, Artificial Sequence
  Synthetic Polypeptide
  MISC_FEATURE: Glucagon analogue
FTSEYSKYLDERRAQDFVQWLMNTGPSSGAPPPS

SEQ ID NO: 1429 - protein, 34 aa, Artificial Sequence; identical to SEQ ID NO: 1428
  Synthetic Polypeptide
  MISC_FEATURE (7)..(11): Lactam bridge connecting residues 7 and 11

SEQ ID NO: 1430 - protein, 34 aa, Artificial Sequence
  Synthetic Polypeptide
  MISC_FEATURE: Glucagon analogue
  MISC_FEATURE (11)..(15): Lactam bridge connecting residues 11 and 15
FTSEYSKYLDERRAKDFVQWLMNTGPSSGAPPPS

SEQ ID NO: 1431 - protein, 34 aa, Artificial Sequence
  Synthetic Polypeptide
  MISC_FEATURE: Glucagon analogue
  MISC_FEATURE (7)..(11): Lactam bridge connecting residues 7 and 11
FTSDYSKYLDERRAQDFVQWLMNTGPSSGAPPPS

SEQ ID NO: 1432 - protein, 34 aa, Artificial Sequence; identical to SEQ ID NO: 1428
  Synthetic Polypeptide
  MISC_FEATURE: Glucagon analogue
  MOD_RES (1)..(1): N-terminal amino group replaced with hydroxy group
  MISC_FEATURE (7)..(11): Lactam bridge connecting residues 7 and 11

SEQ ID NO: 1433 - protein, 34 aa, Artificial Sequence; identical to SEQ ID NO: 1430
  Synthetic Polypeptide
  MISC_FEATURE: Glucagon analogue
  MOD_RES (1)..(1): N-terminal amino group replaced with hydroxy group
  MISC_FEATURE (11)..(15): Lactam bridge connecting residues 11 and 15

SEQ ID NO: 1434 - protein, 24 aa, Artificial Sequence
  Synthetic Polypeptide
  MISC_FEATURE: Glucagon analogue
  MOD_RES (1)..(1): N-terminal amino group replaced with hydroxy group
FTSDYSKYLDSRRAQDFVQWLMDT

SEQ ID NO: 1435 - protein, 24 aa, Artificial Sequence
  Synthetic Polypeptide
  MISC_FEATURE: Glucagon analogue
  MOD_RES (1)..(1): N-terminal amino group replaced with hydroxy group
  MISC_FEATURE (7)..(11): Lactam bridge connecting residues 7 and 11
FTSEYSKYLDERRAQDFVQWLMNT

SEQ ID NO: 1436 - protein, 24 aa, Artificial Sequence
  Synthetic Polypeptide
  MISC_FEATURE: Glucagon analogue
  MOD_RES (1)..(1): N-terminal amino group replaced with hydroxy group
  MISC_FEATURE (11)..(15): Lactam bridge connecting residues 11 and 15
FTSEYSKYLDERRAKDFVQWLMNT

SEQ ID NO: 1437 - protein, 31 aa, Artificial Sequence
  Synthetic Polypeptide
  MISC_FEATURE: Glucagon analogue
HSQGTFTSDYARYLDARRAREFIKWLVRGRG

SEQ ID NO: 1438 - protein, 24 aa, Artificial Sequence
  Synthetic Polypeptide
  MISC_FEATURE: Glucagon analogue
  MOD_RES (1)..(1): N-terminal amino group replaced with hydroxy group
  MOD_RES (24)..(24): C-terminal alpha carboxylate replaced with amide
FTSDYSKYLDERRAQDFVQWLMNT

SEQ ID NO: 1439 - protein, 24 aa, Artificial Sequence
  Synthetic Polypeptide
  MISC_FEATURE: Glucagon analogue
  MOD_RES (1)..(1): N-terminal amino group replaced with hydroxy group
  MISC_FEATURE (4)..(4): Xaa is aspartic acid, glutamic acid, cysteic acid or homocysteic acid
  MISC_FEATURE (10)..(10): Xaa is Asp, Glu, cysteic acid, homoglutamic acid or homocysteic acid
  MISC_FEATURE (22)..(22): Xaa is Met, Leu or Nle
  MOD_RES (24)..(24): C-terminal alpha carboxylate replaced with amide
FTSXYSKYLXERRAKDFVQWLXNT

SEQ ID NO: 1440 - protein, 29 aa, Artificial Sequence
  Synthetic Polypeptide
  MISC_FEATURE: Glucagon analogue
HSQGTFTSDYSKYLDSCRAQDFVQWLMNT

SEQ ID NO: 1441 - protein, 39 aa, Artificial Sequence; identical to SEQ ID NO: 36
  Synthetic Polypeptide
  MISC_FEATURE: Glucagon Analogue

SEQ ID NO: 1442 - protein, 29 aa, Artificial Sequence
  Synthetic Polypeptide
  MISC_FEATURE: Glucagon analogue
  MOD_RES (24)..(24): 2-butyrolactone bound through thiol group of Cysteine
HSQGTFTSDYSKYLDSRRAQCFVQWLMNT

SEQ ID NO: 1443 - protein, 29 aa, Artificial Sequence
  Synthetic Polypeptide
  MISC_FEATURE: Glucagon Analogue
  MOD_RES (21)..(21): Carboxymethyl group bound through thiol group of Cysteine
HSQGTFTSDYSKYLDSRRAQCFVQWLMNT

SEQ ID NO: 1444 - protein, 39 aa, Homo sapiens
HSQGTFTSDYSRYLDSRRAQDFVQWLRNTGPSSGAPPPS

SEQ ID NO: 1445 - protein, 35 aa, Artificial Sequence; identical to SEQ ID NO: 1346
  Synthetic Polypeptide
  MISC_FEATURE: Glucagon analogue
  MOD_RES (1)..(1): N-terminal amino group replaced with hydroxy group
  MISC_FEATURE (4)..(4): Xaa is aspartic acid, glutamic acid, cysteic acid or homocysteic acid
  MISC_FEATURE (7)..(11): Lactam bridge connecting residues 7 and 11
  MISC_FEATURE (10)..(10): Xaa is Asp, Glu, cysteic acid, homoglutamic acid or homocysteic acid
  MISC_FEATURE (22)..(22): Xaa is Met, Leu or Nle
  MISC_FEATURE (23)..(23): Xaa is Asn, Lys, Asp, Glu, cysteic acid and homocysteic acid
  MISC_FEATURE (24)..(24): Xaa is Thr, Asp, Glu, cysteic acid and homocysteic acid
  MISC_FEATURE (25)..(25): Xaa is Cys, Orn, homocysteine or acetyl phenyalanine
  MOD_RES (25)..(25): Pegylated

SEQ ID NO: 1446 - protein, 35 aa, Artificial Sequence; identical to SEQ ID NO: 1347
  Synthetic Polypeptide
  MISC_FEATURE: Glucagon analogue
  MOD_RES (1)..(1): N-terminal amino group replaced with hydroxy group
  MISC_FEATURE (4)..(4): Xaa is aspartic acid, glutamic acid, cysteic acid or homocysteic acid
  MISC_FEATURE (10)..(10): Xaa is Asp, Glu, cysteic acid, homoglutamic acid or homocysteic acid
  MISC_FEATURE (11)..(15): Lactam bridge connecting residues 11 and 15
  MISC_FEATURE (22)..(22): Xaa is Met, Leu or Nle
  MISC_FEATURE (23)..(23): Xaa is Asn, Lys, Asp, Glu, cysteic acid and homocysteic acid
  MISC_FEATURE (24)..(24): Xaa is Thr, Asp, Glu, cysteic acid and homocysteic acid
  MISC_FEATURE (35)..(35): Xaa is Cys, Orn, homocysteine or acetyl phenyalanine
  MOD_RES (35)..(35): Pegylated

SEQ ID NO: 1447 - protein, 24 aa, Artificial Sequence
  Synthetic Polypeptide
  MISC_FEATURE: Glucagon analogue
  MISC_FEATURE (4)..(4): Xaa is glutamic acid, homoglutamic acid, cysteic acid or homocysteic acid
  MISC_FEATURE (7)..(11): Lactam bridge connecting residues 7 and 11
  MISC_FEATURE (10)..(10): Xaa is Glu or Asp
  MISC_FEATURE (22)..(22): Xaa is Met, Leu or Nle
  MISC_FEATURE (23)..(23): Xaa is Asn, Asp or Glu
FTSXYSKYLXERRAQDFVQWLXXT

SEQ ID NO: 1448 - protein, 24 aa, Artificial Sequence
  Synthetic Polypeptide
  MISC_FEATURE: Glucagon analogue
  MISC_FEATURE (4)..(4): Xaa is glutamic acid, homoglutamic acid,  cysteic acid or homocysteic acid
  MISC_FEATURE (10)..(10): Xaa is Asp or Glu
  MISC_FEATURE (11)..(15): Lactam bridge connecting residues 11 and 15
  MISC_FEATURE (22)..(22): Xaa is Met, Leu or Nle
  MISC_FEATURE (23)..(23): Xaa is Asn, Asp or Glu
FTSXYSKYLXERRAKDFVQWLXXT

SEQ ID NO: 1449 - protein, 23 aa, Artificial Sequence
  Synthetic Polypeptide
  MISC_FEATURE: Glucagon analogue
TSDYSKYLDERRAKDFVQWLMDT

SEQ ID NO: 1450 - protein, 11 aa, Artificial Sequence
  Synthetic Polypeptide
  MISC_FEATURE: Peptide fragment representing the carboxy terminal 10 amino acids of Exendin-4 plus one additional amino acid
  MISC_FEATURE (11)..(11): Xaa is selected form the group consisting of Cys, Orn, Lys, homocysteine and acetyl phenyalanine
GPSSGAPPPSX

SEQ ID NO: 1451 - protein, 24 aa, Artificial Sequence
  Synthetic Polypeptide
  MISC_FEATURE: Glucagon analogue
  MOD_RES (1)..(1): N-terminal amino group replaced with hydroxy group
  MISC_FEATURE (4)..(4): Xaa is aspartic acid, glutamic acid, cysteic acid, homoglutamic acid or homocysteic acid
  MISC_FEATURE (7)..(7): Xaa is Lys or Glu
  MISC_FEATURE (10)..(10): Xaa is Asp, Glu, cysteic acid, homoglutamic acid or homocysteic acid
  MISC_FEATURE (11)..(11): Xaa is Ala, Ser, Glu, Lys Gln, homoglutamic acid or homocysteic acid
  MISC_FEATURE (15)..(15): Xaa is Arg, Gln, Glu or Lys
  MISC_FEATURE (19)..(19): Xaa is Ala, Gln, Lys or Glu
  MISC_FEATURE (22)..(22): Xaa is Met, Leu or Nle
  MISC_FEATURE (23)..(23): Xaa is Asn, Lys or an acidic amino acid
  MISC_FEATURE (24)..(24): Xaa is Thr, Gly or an acidic amino acid
FTSXYSXYLXXRRAXDFVXWLXXX

SEQ ID NO: 1452 - protein, 6 aa, Artificial Sequence
  Synthetic Polypeptide
  MISC_FEATURE (6)..(6): Xaa is phenyl lactic acid
HSQGTX

SEQ ID NO: 1453 - protein, 5 aa, Artificial Sequence
  Synthetic Polypeptide
  MISC_FEATURE (5)..(5): Xaa is phenyl lactic acid
SQGTX

SEQ ID NO: 1454 - protein, 4 aa, Artificial Sequence
  Synthetic Polypeptide
  MISC_FEATURE (4)..(4): Xaa is phenyl lactic acid
QGTX

SEQ ID NO: 1455 - protein, 3 aa, Artificial Sequence
  Synthetic Polypeptide
  MISC_FEATURE (3)..(3): Xaa is phenyl lactic acid
GTX

SEQ ID NO: 1456 - protein, 2 aa, Artificial Sequence
  Synthetic Polypeptide
  MISC_FEATURE (2)..(2): Xaa is phenyl lactic acid
TX

SEQ ID NO: 1457 - protein, 6 aa, Artificial Sequence
  Synthetic Polypeptide
  MISC_FEATURE (1)..(1): Xaa is selected from a group consisting of His, D-histidine, alpha, alpha-dimethyl imidiazole acetic acid (DMIA), N-methyl histidine, alpha-methyl histidine, imidazole acetic acid, desaminohistidine, hydroxyl-histidine, acetyl-histidine and
  MISC_FEATURE (2)..(2): Xaa is selected from a group consisting of Ser, D-serine, D-alanine, Val, Gly, N-methyl serine, N-methyl alanine, and aminoisobutyric acid (AIB)
  MISC_FEATURE (3)..(3): Xaa is selected from a group consisting of Glu or Gln
  MISC_FEATURE (6)..(6): Xaa is phenyl lactic acid
XXXGTX

SEQ ID NO: 1458 - protein, 5 aa, Artificial Sequence
  Synthetic Polypeptide
  MISC_FEATURE (1)..(1): Xaa is selected from a group consisting of Ser, D-serine, D-alanine, Val, Gly, N-methyl serine, N-methyl alanine, and aminoisobutyric acid (AIB)
  MISC_FEATURE (2)..(2): Xaa is selected from a group consisting of Glu or Gln
  MISC_FEATURE (5)..(5): Xaa is phenyl lactic acid
XXGTX

SEQ ID NO: 1459 - protein, 4 aa, Artificial Sequence
  Synthetic Polypeptide
  MISC_FEATURE (1)..(1): Xaa is selected from a group consisting of Glu or Gln
  MISC_FEATURE (4)..(4): Xaa is phenyl lactic acid
XGTX

SEQ ID NO: 1460 - protein, 24 aa, Artificial Sequence
  Synthetic Polypeptide
  MOD_RES (1)..(1): N-terminal amino group replaced with hydroxy group
  MISC_FEATURE (11)..(15): Lactam bridge connecting residues 11 and 15
  MOD_RES (24)..(24): C-terminal alpha carboxylate replaced with amide
FTSDYSKYLDERRAKDFVQWLMDT

SEQ ID NO: 1461 - protein, 24 aa, Artificial Sequence
  Synthetic Polypeptide
  MOD_RES (1)..(1): N-terminal amino group replaced with hydroxy group
  MOD_RES (24)..(24): C-terminal alpha carboxylate replaced with amide
FTSEYSKYLDSRRAQDFVQWLMNT

SEQ ID NO: 1462 - protein, 24 aa, Artificial Sequence
  Synthetic Polypeptide
  MOD_RES (1)..(1): N-terminal amino group replaced with hydroxy group
  MISC_FEATURE (4)..(7): Lactam bridge connecting residues 4 and 7
  MOD_RES (24)..(24): C-terminal alpha carboxylate replaced with amide
FTSEYSKYLDSRRAQDFVQWLMNT

SEQ ID NO: 1463 - protein, 28 aa, Artificial Sequence
  Synthetic Polypeptide
  MISC_FEATURE (15)..(19): Lactam bridge connecting residues 15 and 19
  MOD_RES (28)..(28): C-terminal alpha carboxylate replaced with amide
AEGTFTSEYSKYLDERRAKDFVQWLMDT

SEQ ID NO: 1464 - protein, 28 aa, Artificial Sequence
  Synthetic Polypeptide
  MISC_FEATURE (4)..(5): Threonine in position 4 and phenyl lactic acid in position 5 are linked via ester bond
  MISC_FEATURE (5)..(5): Xaa is phenyl lactic acid
  MISC_FEATURE (15)..(19): Lactam bridge connecting residues 15 and 19
  MOD_RES (28)..(28): C-terminal alpha carboxylate replaced with amide
AEGTXTSDYSKYLDERRAKDFVQWLMDT

SEQ ID NO: 1465 - protein, 28 aa, Artificial Sequence
  Synthetic Polypeptide
  MISC_FEATURE (15)..(19): Lactam bridge connecting residues 15 and 19
  MOD_RES (28)..(28): C-terminal alpha carboxylate replaced with amide
SQGTFTSEYSKYLDERRAKDFVQWLMDT

SEQ ID NO: 1466 - protein, 28 aa, Artificial Sequence
  Synthetic Polypeptide
  MISC_FEATURE (4)..(5): Threonine in position 4 and phenyl lactic acid in position 5 are linked via ester bond
  MISC_FEATURE (5)..(5): Xaa is phenyl lactic acid
  MISC_FEATURE (15)..(19): Lactam bridge connecting residues 15 and 19
  MOD_RES (28)..(28): C-terminal alpha carboxylate replaced with amide
SQGTXTSDYSKYLDERRAKDFVQWLMDT

SEQ ID NO: 1467 - protein, 24 aa, Artificial Sequence
  Synthetic Polypeptide
  MOD_RES (1)..(1): N-terminal amino group replaced with hydroxy group
  MISC_FEATURE (5)..(5): Covalently linked to a cholesterol acid moiety
  MISC_FEATURE (11)..(15): Lactam bridge connecting residues 11 to 15
  MOD_RES (24)..(24): C-terminal alpha carboxylate replaced with amide
FTSDKSKYLDERRAKDFVQWLMDT

SEQ ID NO: 1468 - protein, 25 aa, Artificial Sequence
  Synthetic Polypeptide
  MOD_RES (1)..(1): N-terminal amino group replaced with hydroxy group
  MISC_FEATURE (11)..(15): Lactam bridge connecting residues 11 and 15
  MISC_FEATURE (25)..(25): Covalently linked to a cholesterol acid moiety
  MOD_RES (25)..(25): C-terminal alpha carboxylate replaced with amide
FTSDYSKYLDERRAKDFVQWLMDTK

SEQ ID NO: 1469 - protein, 35 aa, Artificial Sequence
  Synthetic Polypeptide
  MOD_RES (1)..(1): N-terminal amino group replaced with hydroxy group
  MISC_FEATURE (11)..(15): Lactam bridge connectiong residues 11 and 15
  MISC_FEATURE (35)..(35): Covalently linked to a cholesterol acid moiety
  MOD_RES (35)..(35): C-terminal alpha carboxylate replaced with amide
FTSDYSKYLDERRAKDFVQWLMDTGPSSGAPPPSK

SEQ ID NO: 1470 - protein, 28 aa, Artificial Sequence
  Synthetic Polypeptide
  MISC_FEATURE (1)..(1): Xaa is amino isobutyric acid
  MISC_FEATURE (4)..(5): Threonine in position 4 and phenyl lactic acid in position 5 are linked via ester bond
  MISC_FEATURE (5)..(5): Xaa is phenyl lactic acid
  MISC_FEATURE (15)..(19): Lactam bridge connectiong residues 15 and 19
  MOD_RES (28)..(28): C-terminal alpha carboxylate replaced with amide
XEGTXTSDYSKYLDERRAKDFVQWLMDT

SEQ ID NO: 1471 - protein, 34 aa, Artificial Sequence; identical to SEQ ID NO: 1428
  Synthetic Polypeptide
  MOD_RES (34)..(34): C-terminal alpha carboxylate replaced with amide

SEQ ID NO: 1472 - protein, 34 aa, Artificial Sequence; identical to SEQ ID NO: 1428
  Synthetic Polypeptide
  MOD_RES (1)..(1): N-terminal amino group replaced with hydroxy group
  MOD_RES (34)..(34): C-terminal alpha carboxylate replaced with amide

SEQ ID NO: 1473 - protein, 34 aa, Artificial Sequence; identical to SEQ ID NO: 1430
  Synthetic Polypeptide
  MISC_FEATURE (11)..(15): Lactam bridge connecting residues 11 and 15
  MOD_RES (34)..(34): C-terminal alpha carboxylate replaced with amide

SEQ ID NO: 1474 - protein, 34 aa, Artificial Sequence; identical to SEQ ID NO: 1430
  Synthetic Polypeptide
  MOD_RES (1)..(1): N-terminal amino group replaced with hydroxy group
  MISC_FEATURE (11)..(15): Lactam bridge connecting residues 11 and 15
  MOD_RES (34)..(34): C-termincal alpha carboxylate replaced with amide

SEQ ID NO: 1475 - protein, 24 aa, Artificial Sequence
  Synthetic Polypeptide
  MOD_RES (1)..(1): N-terminal amino group replaced with hydroxy group
  MISC_FEATURE (7)..(11): Lactam bridge connecting residues 7 and 11
  MOD_RES (24)..(24): C-terminal alpha carboxylate replaced with amide
FTSDYSKYLDERRAQDFVQWLMDT

SEQ ID NO: 1476 - protein, 24 aa, Artificial Sequence
  Synthetic Polypeptide
  MOD_RES (1)..(1): N-terminal amino group replaced with hydroxy group
  MISC_FEATURE (11)..(15): Lactam bridge connecting residues 11 and 15
  MOD_RES (24)..(24): C-terminal alpha carboxylate replaced with amide
FTSDYSKYLDERRAKDFVQWLMDT

SEQ ID NO: 1477 - protein, 24 aa, Artificial Sequence
  Synthetic Polypeptide
  MOD_RES (1)..(1): N-terminal amino group replaced with hydroxy group
  MISC_FEATURE (15)..(19): Lactam bridge connecting residues 15 and 19
  MOD_RES (24)..(24): C-terminal alpha carboxylate replaced with amide
FTSDYSKYLDERRAKDFVEWLMDT

SEQ ID NO: 1478 - protein, 24 aa, Artificial Sequence
  Synthetic Polypeptide
  MOD_RES (1)..(1): N-terminal amino group replaced with hydroxy group
  MISC_FEATURE (19)..(23): Lactam bridge connecting residues 19 and 23
  MOD_RES (24)..(24): C-terminal alpha carboxylate replaced with amide
FTSDYSKYLDERRAQDFVEWLMKT

SEQ ID NO: 1479 - protein, 24 aa, Artificial Sequence
  Synthetic Polypeptide
  MOD_RES (1)..(1): N-terminal amino group replaced with hydroxy group
  MISC_FEATURE (7)..(11): Lactam bridge connecting residues 7 and 11
  MOD_RES (24)..(24): C-terminal alpha carboxylate replaced with amide
FTSDYSKYLDEQAAKDFIAWLMDT

SEQ ID NO: 1480 - protein, 24 aa, Artificial Sequence
  Synthetic Polypeptide
  MOD_RES (1)..(1): N-terminal amino group replaced with hydroxy group
  MISC_FEATURE (11)..(15): Lactam bridge connecting residues 11 and 15
  MOD_RES (24)..(24): C-terminal alpha carboxylate replaced with amide
FTSDYSKYLDEQAAKEFIAWLMDT

SEQ ID NO: 1481 - protein, 28 aa, Artificial Sequence
  Synthetic Polypeptide
  MISC_FEATURE (15)..(19): Lactam bridge connecting residues 15 and 19
  MOD_RES (28)..(28): C-terminal alpha carboxylate replaced with amide
AEGTFTSEYSKYLDERRAKDFVQWLMDT

SEQ ID NO: 1482 - protein, 28 aa, Artificial Sequence
  Synthetic Polypeptide
  MISC_FEATURE (15)..(19): Lactam bridge connecting residues 15 and 19
  MOD_RES (28)..(28): C-terminal alpha carboxylate replaced with amide
AEGTFTSEYSKYLDEQAAKEFIAWLMDT

SEQ ID NO: 1483 - protein, 29 aa, Artificial Sequence
  Synthetic Polypeptide
  MISC_FEATURE (16)..(20): Lactam bridge connection residues 16 and 20
  MOD_RES (29)..(29): C-terminal alpha carboxylate replaced with amide
HAEGTFTSEYSKYLDERRAKDFVQWLMDT

SEQ ID NO: 1484 - protein, 29 aa, Artificial Sequence
  Synthetic Polypeptide
  MISC_FEATURE (16)..(20): Lactam bridge connecting bridges 16 and 20
  MOD_RES (29)..(29): C-terminal alpha carboxylate replaced with amide
HAEGTFTSEYSKYLDEQAAKEFIAWLMDT

SEQ ID NO: 1485 - protein, 26 aa, Artificial Sequence
  Synthetic Polypeptide
  MISC_FEATURE (13)..(17): Lactam bridge connecting residues 13 and 17
  MOD_RES (26)..(26): C-terminal alpha carboxylate replaced with amide
GTFTSEYSKYLDERRAKDFVQWLMDT

SEQ ID NO: 1486 - protein, 28 aa, Artificial Sequence
  Synthetic Polypeptide
  MISC_FEATURE (5)..(6): Threonine in position 5 and phenyl lactic acid in position 6 linked via ester bond
  MISC_FEATURE (15)..(19): Lactam bridge connecting residues 15 and 19
  MOD_RES (28)..(28): C-terminal alpha carboxylate replaced with amide
SQGTFTSEYSKYLDERRAKDFVQWLMDT

SEQ ID NO: 1487 - protein, 29 aa, Artificial Sequence
  Synthetic Polypeptide
  MISC_FEATURE (5)..(6): Threonine at position 5 and phenyl lactic acid at position 6 linked via ester bond
  MISC_FEATURE (6)..(6): Xaa is phenyl lactic acid
  MISC_FEATURE (16)..(20): Lactam bridge connecting residues 16 and 20
  MOD_RES (29)..(29): C-terminal alpha carboxylate replaced with amide
HAEGTXTSDYSKYLDERRAKDFVQWLMDT

SEQ ID NO: 1488 - protein, 24 aa, Artificial Sequence
  Synthetic Polypeptide
  MOD_RES (1)..(1): N-terminal amino group replaced with hydroxy group
  MISC_FEATURE (7)..(11): Lactam bridge connecting residues 7 and 11
  MOD_RES (19)..(19): Pegylated
  MOD_RES (24)..(24): C-terminal alpha carboxylate replaced with amide
FTSDYSKYLDERRAQDFVCWLMDT

SEQ ID NO: 1489 - protein, 35 aa, Artificial Sequence
  Synthetic Polypeptide
  MOD_RES (1)..(1): N-terminal amino group replaced with hydroxy group
  MISC_FEATURE (7)..(11): Lactam bridge connecting residues 7 and 11
  MOD_RES (35)..(35): Pegylated
  MOD_RES (35)..(35): C-terminal alpha carboxylate replaced with amide
FTSDYSKYLDERRAQDFVQWLMDTGPSSGAPPPSC

SEQ ID NO: 1490 - protein, 24 aa, Artificial Sequence
  Synthetic Polypeptide
  MOD_RES (1)..(1): N-terminal amino group replaced with hydroxy group
  MISC_FEATURE (11)..(15): Lactam bridge connecting residues 11 and 15
  MOD_RES (19)..(19): Pegylated
  MOD_RES (24)..(24): C-terminal alpha carboxylate replaced with amide
FTSDYSKYLDERRAKDFVCWLMDT

SEQ ID NO: 1491 - protein, 35 aa, Artificial Sequence
  Synthetic Polypeptide
  MOD_RES (1)..(1): N-terminal amino group replaced with hydroxy group
  MISC_FEATURE (11)..(15): Lactam bridge connecting residues 11 and 15
  MOD_RES (35)..(35): Pegylated
  MOD_RES (35)..(35): C-terminal alpha carboxylate replaced with amide
FTSDYSKYLDERRAKDFVQWLMDTGPSSGAPPPSC

SEQ ID NO: 1492 - protein, 24 aa, Artificial Sequence
  Synthetic Polypeptide
  MOD_RES (1)..(1): N-terminal amino group replaced with hydroxy group
  MOD_RES (1)..(1): Covalently attached to a C16 fatty acid
  MISC_FEATURE (11)..(15): Lactam bridge connection residues 11 and 15
  MOD_RES (24)..(24): C-terminal alpha carboxylate replaced with amide
FTSDYSKYLDERRAKDFVQWLMDT

SEQ ID NO: 1493 - protein, 24 aa, Artificial Sequence
  Synthetic Polypeptide
  MOD_RES (1)..(1): N-terminal amino group replaced with hydroxy group
  MOD_RES (5)..(5): Linked to a C16 fatty acid via Glu residue
  MISC_FEATURE (11)..(15): Lactam bridge connecting residues 11 and 15
  MISC_FEATURE (15)..(15): Linked to a C16 fatty acid via Glu residue
  MOD_RES (24)..(24): C-terminal alpha carboxylate replaced with amide
FTSDKSKYLDERRAKDFVQWLMDT

SEQ ID NO: 1494 - protein, 24 aa, Artificial Sequence
  Synthetic Polypeptide
  MOD_RES (1)..(1): N-terminal amino group replaced with hydroxy group
  MISC_FEATURE (15)..(15): Linked to C16 fatty acid via Glu residue
  MOD_RES (24)..(24): C-terminal alpha carboxylate replaced with amide
FTSDYSKYLDERRAKDFVQWLMDT

SEQ ID NO: 1495 - protein, 24 aa, Artificial Sequence
  Synthetic Polypeptide
  MOD_RES (1)..(1): N-terminal amino group replaced with hydroxy group
  MISC_FEATURE (11)..(15): Lactam bridge connecting residues 11 and 15
  MISC_FEATURE (19)..(19): Linked to a C16 fatty acid via Glu residue
  MOD_RES (24)..(24): C-terminal alpha carboxylate replaced with amide
FTSDYSKYLDERRAKDFVKWLMDT

SEQ ID NO: 1496 - protein, 24 aa, Artificial Sequence
  Synthetic Polypeptide
  MOD_RES (1)..(1): N-terminal amino group replaced with hydroxy group
  MISC_FEATURE (11)..(15): Lactam bridge connecting residues 11 and 15
  MISC_FEATURE (24)..(24): Linked to a C16 fatty acid via Glu residue
  MOD_RES (24)..(24): C-terminal alpha carboxylate replaced with amide
FTSDYSKYLDERRAKDFVQWLMDK

SEQ ID NO: 1497 - protein, 24 aa, Artificial Sequence
  Synthetic Polypeptide
  MOD_RES (1)..(1): N-terminal amino group replaced with hydroxy group
  MISC_FEATURE (11)..(11): Xaa is amino isobutyric acid
  MOD_RES (24)..(24): C-terminal alpha carboxylate replaced with amide
FTSDYSKYLDXRRAQDFVQWLMNT

SEQ ID NO: 1498 - protein, 24 aa, Artificial Sequence
  Synthetic Polypeptide
  MOD_RES (1)..(1): N-terminal amino group replaced with hydroxy group
  MISC_FEATURE (11)..(11)
  MISC_FEATURE (15)..(15): Xaa is alpha isobutyric acid
  MOD_RES (24)..(24): C-terminal alpha carboxylate replaced with amide
FTSDKSKYLDXRRAXDFVCWLMNT

SEQ ID NO: 1499 - protein, 24 aa, Artificial Sequence
  Synthetic Polypeptide
  MOD_RES (1)..(1): N-terminal amino group replaced with hydroxy group
  MOD_RES (24)..(24): C-terminal alpha carboxylate replaced with amide
FTSDYSKYLDERRAQDFVQWLMNT

SEQ ID NO: 1500 - protein, 24 aa, Artificial Sequence
  Synthetic Polypeptide
  MOD_RES (1)..(1): N-terminal amino group replaced with hydroxy group
  MOD_RES (24)..(24): C-terminal alpha carboxylate replaced with amide
FTSDKSKYLDERRAQDFVCWLMNT

SEQ ID NO: 1501 - protein, 24 aa, Artificial Sequence
  Synthetic Polypeptide
  MISC_FEATURE (4)..(7): Lactam bridge connecting residues 4 and 7
  MOD_RES (11)..(11): Xaa is alpha isobutyric acid
  MOD_RES (24)..(24): C-terminal carboxylate replaced with amide
FTSEYSKYLDXRRAQDFVQWLMNT

SEQ ID NO: 1502 - protein, 24 aa, Artificial Sequence
  Synthetic Polypeptide
  MISC_FEATURE (4)..(7): Lactam bridge connecting residues 4 and 7
  MOD_RES (11)..(11): Xaa is alpha isobutyric acid
  MOD_RES (24)..(24): C-terminal carboxylate replaced with amide
FTSEYSKYLDXRRAQDFVQWLMNT

SEQ ID NO: 1503 - protein, 24 aa, Artificial Sequence
  Synthetic Polypeptide
  MOD_RES (1)..(1): N-terminal amino group replaced with hydroxy group
  MISC_FEATURE (11)..(15): Lactam bridge connecting residues 11 and 15
  MOD_RES (24)..(24): C-terminal alpha carboxylate replaced with amide
FTSDYSKYLDERRAKEFVQWLMDT

SEQ ID NO: 1504 - protein, 24 aa, Artificial Sequence
  Synthetic Polypeptide
  MOD_RES (1)..(1): N-terminal amino group replaced with hydroxy group
  MOD_RES (24)..(24): C-terminal alpha carboxylate replaced with amide
FTSDYSKYLDEQAAKEFIAWLMNT

SEQ ID NO: 1505 - protein, 34 aa, Artificial Sequence; identical to SEQ ID NO: 1430
  Synthetic Polypeptide
  MOD_RES (34)..(34): C-terminal alpha carboxylate replaced with amide

SEQ ID NO: 1506 - protein, 24 aa, Artificial Sequence
  Synthetic Polypeptide
  MOD_RES (1)..(1): N-terminal amino group replaced with hydroxy group
  MISC_FEATURE (5)..(5): Linked to a C16 fatty acid via Glu residue
  MISC_FEATURE (7)..(7): Linked to a C16 fatty acid via Glu residue
  MOD_RES (24)..(24): C-terminal carboxylate replaced with amide
FTSDKSKYLDERRAKDFVQWLMDT

SEQ ID NO: 1507 - protein, 6 aa, Artificial Sequence
  Synthetic Polypeptide
  MISC_FEATURE (1)..(1): Xaa1 is selected from a group consisting of His, D-histidine, alpha, alpha-dimethyl imidiazole acetic acid (DMIA), N-methyl histidine, alpha-methyl histidine, imidazole acetic acid, desaminohistidine, hydroxyl-histidine, acetyl-histidine and
  MISC_FEATURE (2)..(2): Xaa is selected from a group consisting of Ser, D-serine, D-alanine, valine, glycine, N-methyl serine, and aminoisobutyric acid (AIB)
  MISC_FEATURE (3)..(3): Xaa is selected from a group consisting of Glu or Gln
XXXTGF

SEQ ID NO: 1508 - protein, 5 aa, Artificial Sequence
  Synthetic Polypeptide
  MISC_FEATURE (1)..(1): Xaa is selected from a group consisting of Ser, D-serine, D-alanine, valine, glycine, N-methyl serine, and aminoisobutyric acid (AIB)
  MISC_FEATURE (2)..(2): Xaa is selected from a group consisting of Glu or Gln
XXTGF

SEQ ID NO: 1509 - protein, 4 aa, Artificial Sequence
  Synthetic Polypeptide
  MISC_FEATURE (1)..(1): Xaa is selected from a group consisting of Glu or Gln
XTGF

SEQ ID NO: 1510 - protein, 24 aa, Artificial Sequence
  Synthetic Polypeptide
  MOD_RES (1)..(1): N-terminal amino group replaced with hydroxy group
  MOD_RES (24)..(24): C-terminal alpha carboxylate replaced with amide
FTSDYSKYLDSRRAQDFVQWLMDT

SEQ ID NO: 1511 - protein, 28 aa, Artificial Sequence
  Synthetic Polypeptide
  MOD_RES (28)..(28): C-terminal alpha carboxylate replaced with amide
SQGTFTSEYSKYLDSRRAQDFVQWLMNT

SEQ ID NO: 1512 - protein, 28 aa, Artificial Sequence
  Synthetic Polypeptide
  MISC_FEATURE (4)..(5): Threonine at position 4 and phenyl lactic acid at position 5 linked via ester bond
  MISC_FEATURE (5)..(5): Xaa is phenyl lactic acid
  MOD_RES (28)..(28): C-terminal alpha carboxylate replaced with amide
SQGTXTSEYSKYLDSRRAQDFVQWLMNT

SEQ ID NO: 1513 - protein, 29 aa, Artificial Sequence
  Synthetic Polypeptide
  MISC_FEATURE (5)..(6): Threorine at position 5 and phenyl lactic acid at position 6 linked via ester bond
  MISC_FEATURE (6)..(6): Xaa is phenyl lactic acid
  MOD_RES (29)..(29): C-terminal alpha carboxylate replaced with amide
HSQGTXTSEYSKYLDSRRAQDFVQWLMNT

SEQ ID NO: 1514 - protein, 24 aa, Artificial Sequence
  Synthetic Polypeptide
  MOD_RES (1)..(1): N-terminal amino group replaced with hydroxy group
  MISC_FEATURE (11)..(15): Lactam bridge connecting residues 11 and 15
  MOD_RES (19)..(19): Pegylated
  MOD_RES (24)..(24): C-terminal alpha carboxylate replaced with amide
FTSEYSKYLDERRAKDFVCWLMNT

SEQ ID NO: 1515 - protein, 24 aa, Artificial Sequence
  Synthetic Polypeptide
  MOD_RES (1)..(1): N-terminal amino group replaced with hydroxy group
  MISC_FEATURE (11)..(15): Lactam bridge connecting residues 11 and 15
  MISC_FEATURE (19)..(19): Pegylated via spacer
  MOD_RES (24)..(24): C-terminal alpha carboxylate replaced with amide
FTSDYSKYLDERRAKDFVKWLMDT

SEQ ID NO: 1516 - protein, 24 aa, Artificial Sequence
  Synthetic Polypeptide
  MOD_RES (1)..(1): N-terminal amino group replaced with hydroxy group
  MISC_FEATURE (11)..(15): Lactam bridge connecting residues 11 and 15
  MOD_RES (19)..(19): Pegylated via rigid spacer
  MOD_RES (24)..(24): C-terminal alpha carboxylate replaced with amide
FTSDYSKYLDERRAKDFVKWLMDT

SEQ ID NO: 1517 - protein, 35 aa, Artificial Sequence
  Synthetic Polypeptide
  MISC_FEATURE (1)..(1): N-terminal amino group replaced with hydroxy group
  MISC_FEATURE (11)..(15): Lactam bridge connecting residues 11 and 15
  MOD_RES (35)..(35): Pegylated
  MOD_RES (35)..(35): C-terminal alpha carboxylate replaced with amide
FTSDYSKYLDERRAKDFVQWLMDTGPGPGPGPGPC

SEQ ID NO: 1518 - protein, 35 aa, Artificial Sequence
  Synthetic Polypeptide
  MOD_RES (1)..(1): N-terminal amino group replaced with hydroxy group
  MISC_FEATURE (11)..(15): Lactam bridge connecting residues 11 and 15
  MOD_RES (35)..(35): Pegylated
  MOD_RES (35)..(35): C-terminal alpha carboxylate reaplaced with amide
FTSDYSKYLDERRAKDFVQWLMDGGPSSGAPPPSC

SEQ ID NO: 1519-1600 - skipped (82 entries)

SEQ ID NO: 1601 - protein, 29 aa, Homo sapiens
  MOD_RES (29)..(29): C-terminal amidation
HSQGTFTSDYSKYLDSRRAQDPVQWLMNT

SEQ ID NO: 1602 - protein, 24 aa, Artificial Sequence
  Glucagon analog
  MOD_RES (1)..(1): N-terminal amino group replaced with hydroxy group
FTSDYSKYLDSRRAQDFVQWLMNT

SEQ ID NO: 1603 - protein, 31 aa, Homo sapiens; identical to SEQ ID NO: 50

SEQ ID NO: 1604 - protein, 30 aa, Homo sapiens; identical to SEQ ID NO: 52
  MOD_RES (30)..(30): AMIDATION

SEQ ID NO: 1605 - protein, 28 aa, Homo sapiens
HGEGTFTSDLSKQMEEAVRLFIEWLKNG

SEQ ID NO: 1606 - protein, 37 aa, Homo sapiens; identical to SEQ ID NO: 825

SEQ ID NO: 1607 - protein, 42 aa, Homo sapiens; identical to SEQ ID NO: 1004

SEQ ID NO: 1608 - protein, 33 aa, Homo sapiens
HADGSFSDEMNTILDNLAARDFINWLIQTKITD

SEQ ID NO: 1609 - protein, 49 aa, Homo sapiens
YLYQWLGAPVPYPDPLEPRREVCELNPDCDELADHIGFQEAYRRFYGPV

SEQ ID NO: 1610 - protein, 10 aa, Artificial Sequence
  peptide fragment representing the carboxy terminal 10 amino acids of Exendin-4
GPSSGAPPPS

SEQ ID NO: 1611 - protein, 10 aa, Artificial Sequence
  peptide fragment representing the carboxy terminal 10 amino acids of Exendin-4
  MOD_RES (10)..(10): AMIDATION
GPSSGAPPPS

SEQ ID NO: 1612 - protein, 11 aa, Artificial Sequence
  peptide fragment representing the carboxy terminal 10 amino acids of Exendin-4
  MOD_RES (11)..(11): Pegylation
GPSSGAPPPSC

SEQ ID NO: 1613 - protein, 13 aa, Artificial Sequence
  peptide fragment representing the carboxy terminal 13 amino acids of GIP peptide
KGKKNDWKHNITQ

SEQ ID NO: 1614 - protein, 8 aa, Artificial Sequence
  peptide fragment representing the carboxy terminal 8 amino acids of oxyntomodulin
KRNRNNIA

SEQ ID NO: 1615 - protein, 6 aa, Artificial Sequence
  Glucagon analogue
  MOD_RES (6)..(6): C-terminal amide
HTRGTF

SEQ ID NO: 1616 - protein, 6 aa, Artificial Sequence
  glucagon analogue
  MOD_RES (1)..(1): d-histidine
  MOD_RES (2)..(2): d-threonine
  MOD_RES (3)..(3): d-arginine
  MOD_RES (5)..(5): d-threonine
  MOD_RES (6)..(6): d-phenylalanine
  MOD_RES (6)..(6): C-terminal amidation
XXXGXX

SEQ ID NO: 1617 - protein, 30 aa, Artificial Sequence
  glucagon analogue
  MOD_RES (24)..(24): pegylation
HAEGTFTSDVSSYLEGQAAKEFICWLVKGR

SEQ ID NO: 1618 - protein, 39 aa, Heloderma suspectum
HGEGTFTSDLSKQMEEEAVRLFIEWLKNGGPSSGAPPPS

SEQ ID NO: 1619 - protein, 29 aa, Homo sapiens
YADAIFTNSYRKVLGQLSARKLLQDIMSR

SEQ ID NO: 1620 - protein, 28 aa, Homo sapiens
  MOD_RES (28)..(28): AMIDATION
HSDAVFTDNYTRLRKQMAVKKYLNSILN

SEQ ID NO: 1621 - protein, 27 aa, Homo sapiens
HSDGIFTDSYSRYRKQMAVKKYLAAVL

SEQ ID NO: 1622 - protein, 27 aa, Homo sapiens
  MOD_RES (27)..(27): AMIDATION
HADGVFTSDFSKLLGQLSAKKYLESLM

SEQ ID NO: 1623 - protein, 27 aa, Homo sapiens
  MOD_RES (27)..(27): AMIDATION
HSDGTFTSELSRLREGARLQRLLQGLV

SEQ ID NO: 1624 - protein, 30 aa, Artificial Sequence
  Synthetic peptide
  MOD_RES (2)..(2): Xaa is AIB
  MOD_RES (24)..(24): Cys residue linked to 40kDa PEG via maleimide
  MOD_RES (30)..(30): C-terminal amidation
HXQGTFTSDYSKYLDEQAAKEFICWLMNTN

SEQ ID NO: 1625 - protein, 29 aa, Artificial Sequence
  Synthetic peptide
  MOD_RES (2)..(2): Xaa is AIB
  MISC_FEATURE (24)..(24): Covalently bound to 40K PEG via thioether
  MOD_RES (29)..(29): AMIDATION
HXEGTFTSDYSKYLDEQAAKEFICWLMNT

SEQ ID NO: 1626 - protein, 31 aa, Artificial Sequence
  Synthetic peptide
  MOD_RES (1)..(1): d-lysine
  MOD_RES (2)..(2): Sarcosine (N-methyl glycine)
  MOD_RES (4)..(4): Xaa is AIB
  MOD_RES (24)..(24): Covalently bound to 40kDa PEG via thioether
  MOD_RES (31)..(31): AMIDATION
KGHXEGTFTSDYSKYLDEQAAKEFICWLMNT

SEQ ID NO: 1627 - protein, 31 aa, Artificial Sequence; identical to SEQ ID NO: 1626
  Synthetic peptide
  MOD_RES (1)..(1): d-lysine
  MOD_RES (2)..(2): N-hexyl-glycine
  MOD_RES (4)..(4): Xaa is AIB
  MOD_RES (24)..(24): Covalently bound to 40kDa PEG via maleimide
  MOD_RES (31)..(31): AMIDATION

SEQ ID NO: 1628 - protein, 31 aa, Artificial Sequence
  Synthetic peptide
  MOD_RES (1)..(1): d-lysine
  MOD_RES (2)..(2): N-methyl phenylalanine
  MOD_RES (4)..(4): Xaa is AIB
  MOD_RES (24)..(24): Covalently bound to 40kDa PEG via thioether
  MOD_RES (31)..(31): AMIDATION
KFHXEGTFTSDYSKYLDEQAAKEFICWLMNT

SEQ ID NO: 1629 - protein, 29 aa, Artificial Sequence
  Synthetic peptide
  MOD_RES (2)..(2): Xaa is AIB
  MOD_RES (24)..(24): Covalently bound to 40 kDa PEG via maleimide
HXEGTFTSDYSKYLDEQAAKEFICWLMNT

SEQ ID NO: 1630 - protein, 29 aa, Artificial Sequence
  Synthetic peptide
  MOD_RES (1)..(1): Xaa is DMIA
  MISC_FEATURE (16)..(20): Lactam ring between side chains of amino acids
  MOD_RES (24)..(24): Covalently bound to 40kDa PEG via maleimide
  MOD_RES (29)..(29): C-terminal amidation
XSQGTFTSDKSKYLDERRAKDFVCWLMNT

SEQ ID NO: 1631 - protein, 30 aa, Artificial Sequence
  Synthetic peptide
  MOD_RES (30)..(30): C-terminal amidation
HSQGTFTSDYSKYLDEQAAKEFIAWLMNTN

SEQ ID NO: 1632 - protein, 8 aa, Artificial Sequence
  Synthetic peptide
  MOD_RES (1)..(1): Xaa is Phe, hydroxyl-Phe, Gly, hydroxyl-Gly, Ala, Cys, Ser, Lys, Glu, dehydro-Val, Pro, d-Pro, AIB, 1-aminocyclohexanecarboxylic acid, 1-aminocyclopropanecarboxylic acid, N-Me-AIB, alpha-alpha-diethyl-Gly, hydroxyl-AIB, or d-Lys
  MOD_RES (2)..(2): Xaa is Pro, d-Pro, N-methyl-Gly, N-hexyl-Gly, Azetidine-2-carboxylic acid, N-methyl-Ala, or N-methyl-Phe
  MOD_RES (3)..(3): Xaa is His, d-His, Ala, or N-methyl-His
  MOD_RES (8)..(8): C-terminal amidation
XXXSRGTF

SEQ ID NO: 1633 - protein, 31 aa, Artificial Sequence
  Synthetic peptide
  MOD_RES (1)..(1): d-Lys
  MOD_RES (2)..(2): Xaa is Sar
  MOD_RES (4)..(4): Xaa is AIB
  MOD_RES (26)..(26): Covalently bound to PEG via 40kDa maleimide
KXHXEGTFTSDYSKYLDEQAAKEFICWLMNT

SEQ ID NO: 1634 - protein, 32 aa, Artificial Sequence
  Synthetic peptide
  MOD_RES (1)..(1): d-Lys
  MOD_RES (2)..(2): Xaa is Sar
  MOD_RES (4)..(4): Xaa is AIB
  MOD_RES (26)..(26): Cys residue linked to 40kDa PEG via maleimide
  MOD_RES (32)..(32): C-terminal amidation
KXHXQGTFTSDYSKYLDEQAAKEFICWLMNTN

SEQ ID NO: 1635 - protein, 31 aa, Artificial Sequence
  Synthetic peptide
  MOD_RES (1)..(1): d-Lys
  MOD_RES (2)..(2): Xaa is Sar
  MOD_RES (3)..(3): Xaa is DMIA
  MISC_FEATURE (18)..(22): Lactam ring between side chains of amino acids
  MOD_RES (26)..(26): Covalently bound to 40kDa PEG via maleimide
  MOD_RES (31)..(31): C-terminal amidation
KXXSQGTFTSDKSKYLDERRAKDFVCWLMNT

SEQ ID NO: 1636 - protein, 31 aa, Artificial Sequence; identical to SEQ ID NO: 1626
  Synthetic peptide
  MOD_RES (1)..(1): d-Lys
  MOD_RES (2)..(2): N-hexyl-Gly
  MOD_RES (4)..(4): Xaa is AIB
  MISC_FEATURE (26)..(26): Covalently bound to 40K PEG via thioether
  MOD_RES (31)..(31): AMIDATION

SEQ ID NO: 1637 - protein, 32 aa, Artificial Sequence
  Synthetic peptide
  MOD_RES (1)..(1): d-Lys
  MOD_RES (2)..(2): N-hexyl-Gly
  MOD_RES (4)..(4): Xaa is AIB
  MOD_RES (26)..(26): Cys residue linked to 40kDa PEG via maleimide
  MOD_RES (32)..(32): C-terminal amidation
KGHXQGTFTSDYSKYLDEQAAKEFICWLMNTN

SEQ ID NO: 1638 - protein, 31 aa, Artificial Sequence
  Synthetic peptide
  MOD_RES (1)..(1): d-Lys
  MOD_RES (2)..(2): N-hexyl-Gly
  MOD_RES (3)..(3): Xaa is DMIA
  MISC_FEATURE (18)..(22): Lactam ring between side chains of amino acids
  MOD_RES (26)..(26): Covalently bound to 40kDa PEG via maleimide
  MOD_RES (31)..(31): C-terminal amidation
KGXSQGTFTSDKSKYLDERRAKDFVCWLMNT

SEQ ID NO: 1639 - protein, 31 aa, Artificial Sequence; identical to SEQ ID NO: 1628
  Synthetic peptide
  MOD_RES (1)..(1): d-Lys
  MOD_RES (2)..(2): N-methyl-Phe
  MOD_RES (4)..(4): Xaa is AIB
  MOD_RES (26)..(26): Covalently bound to 40kDa PEG via maleimide

SEQ ID NO: 1640 - protein, 32 aa, Artificial Sequence
  Synthetic peptide
  MOD_RES (1)..(1): d-Lys
  MOD_RES (2)..(2): N-methyl-Phe
  MOD_RES (4)..(4): Xaa is AIB
  MOD_RES (26)..(26): Cys residue linked to 40kDa PEG via maleimide
  MOD_RES (32)..(32): C-terminal amidation
KFHXQGTFTSDYSKYLDEQAAKEFICWLMNTN

SEQ ID NO: 1641 - protein, 31 aa, Artificial Sequence
  Synthetic peptide
  MOD_RES (1)..(1): d-Lys
  MOD_RES (2)..(2): N-methyl-Phe
  MOD_RES (3)..(3): Xaa is DMIA
  MISC_FEATURE (18)..(22): Lactam ring between side chains of amino acids
  MOD_RES (26)..(26): Covalently bound to 40kDa PEG via maleimide
  MOD_RES (31)..(31): C-terminal amidation
KFXSQGTFTSDKSKYLDERRAKDFVCWLMNT

SEQ ID NO: 1642 - protein, 27 aa, Artificial Sequence
  Synthetic peptide
HADGVFTSDFSKLLGQLSAKKYLESLM

SEQ ID NO: 1643 - protein, 4 aa, Artificial Sequence
  Synthetic peptide
KRNR

SEQ ID NO: 1644 - protein, 100 aa, Homo sapiens
MRALTLLALLALAALCIAGQAGAKPSGAESSKGAAFVSKQEGSEVVKRPRRYLYQWLGAPVPYPDPLEPRREVCELNPDCDELADHIGFQEAYRRFYGPV

SEQ ID NO: 1645 - protein, 32 aa, Homo sapiens
CGNLSTCMLGTYTQDFNKFHTFPQTAIGVGAP

SEQ ID NO: 1646 - protein, 37 aa, Homo sapiens [sequence omitted]

SEQ ID NO: 1647 - protein, 40 aa, Artificial Sequence
  Synthetic peptide
  MOD_RES (2)..(2): Xaa is AIB
  MOD_RES (40)..(40): C-terminal amidation
HXEGTFTSDVSSYLEEQAAKEFIAWLVKGGPSSGAPPPSK

SEQ ID NO: 1648 - protein, 40 aa, Artificial Sequence
  Synthetic peptide
  MOD_RES (2)..(2): Xaa is AIB
  MISC_FEATURE (40)..(40): C-terminal amidation
HXEGTFTSDVSSYLEGQAAKEAIAWLVKGGPSSGAPPPSK

SEQ ID NO: 1649 - protein, 40 aa, Artificial Sequence
  Synthetic peptide
  MOD_RES (1)..(1): D-Ala
  MOD_RES (2)..(2): Xaa is AIB
  MOD_RES (3)..(3): D-Glu
  MOD_RES (5)..(5): D-Thr
  MOD_RES (6)..(6): D-Phe
  MOD_RES (7)..(7): D-Thr
  MOD_RES (8)..(8): D-Ser
  MOD_RES (9)..(9): D-Asp
  MOD_RES (10)..(10): D-Val
  MOD_RES (11)..(11): D-Ser
  MOD_RES (12)..(12): D-Ser
  MOD_RES (13)..(13): D-Tyr
  MOD_RES (14)..(14): D-Leu
  MOD_RES (15)..(15): D-Glu
  MOD_RES (17)..(17): D-Gln
  MOD_RES (18)..(18): D-Ala
  MOD_RES (19)..(19): D-Ala
  MOD_RES (20)..(20): D-Lys
  MOD_RES (21)..(21): D-Glu
  MOD_RES (22)..(22): D-Ala
  MOD_RES (23)..(23): D-Ile
  MOD_RES (24)..(24): D-Ala
  MOD_RES (25)..(25): D-Trp
  MOD_RES (26)..(26): D-Leu
  MOD_RES (27)..(27): D-Val
  MOD_RES (28)..(28): D-Lys
  MOD_RES (31)..(31): D-Pro
  MOD_RES (32)..(32): D-Ser
  MOD_RES (33)..(33): D-Ser
  MOD_RES (35)..(35): D-Ala
  MOD_RES (36)..(36): D-Pro
  MOD_RES (37)..(37): D-Pro
  MOD_RES (38)..(38): D-Pro
  MOD_RES (39)..(39): D-Ser
  MOD_RES (40)..(40): C-terminal amidation
AXEGTFTSDVSSYLEGQAAKEAIAWLVKGGPSSGAPPPSK

SEQ ID NO: 1650 - protein, 40 aa, Artificial Sequence
  Synthetic peptide
  MOD_RES (2)..(2): Xaa is AIB
  MOD_RES (24)..(24): Covalently bound to 40kDa PEG via thioether
  MOD_RES (40)..(40): C-terminal amidation
HXEGTFTSDVSSYLEEQAAKEFICWLVKGGPSSGAPPPSK

SEQ ID NO: 1651 - protein, 40 aa, Artificial Sequence; identical to SEQ ID NO: 1647
  Synthetic peptide
  MOD_RES (2)..(2): Xaa is AIB
  MOD_RES (40)..(40): Covalently bound to 3-position of beta-estradiol via ether linkage
  MOD_RES (40)..(40): C-terminal amidation

SEQ ID NO: 1652 - protein, 40 aa, Artificial Sequence; identical to SEQ ID NO: 1648
  Synthetic peptide
  MOD_RES (2)..(2): Xaa is AIB
  MOD_RES (40)..(40): Covalently bound to 3-position of beta-estradiol via ether linkage
  MOD_RES (40)..(40): C-terminal amidation

SEQ ID NO: 1653 - protein, 40 aa, Artificial Sequence; identical to SEQ ID NO: 1649
  Synthetic peptide
  MOD_RES (1)..(1): D-Ala
  MOD_RES (2)..(2): Xaa is AIB
  MOD_RES (3)..(3): D-Glu
  MOD_RES (5)..(5): D-Thr
  MOD_RES (6)..(6): D-Phe
  MOD_RES (7)..(7): D-Thr
  MOD_RES (8)..(8): D-Ser
  MOD_RES (9)..(9): D-Asp
  MOD_RES (10)..(10): D-Val
  MOD_RES (11)..(11): D-Ser
  MOD_RES (12)..(12): D-Ser
  MOD_RES (13)..(13): D-Tyr
  MOD_RES (14)..(14): D-Leu
  MOD_RES (15)..(15): D-Glu
  MOD_RES (17)..(17): D-Gln
  MOD_RES (18)..(18): D-Ala
  MOD_RES (19)..(19): D-Ala
  MOD_RES (20)..(20): D-Lys
  MOD_RES (21)..(21): D-Glu
  MOD_RES (22)..(22): D-Ala
  MOD_RES (23)..(23): D-Ile
  MOD_RES (24)..(24): D-Ala
  MOD_RES (25)..(25): D-Trp
  MOD_RES (26)..(26): D-Leu
  MOD_RES (27)..(27): D-Val
  MOD_RES (28)..(28): D-Lys
  MOD_RES (31)..(31): D-Pro
  MOD_RES (32)..(32): D-Ser
  MOD_RES (33)..(33): D-Ser
  MOD_RES (35)..(35): D-Ala
  MOD_RES (36)..(36): D-Pro
  MOD_RES (37)..(37): D-Pro
  MOD_RES (38)..(38): D-Pro
  MOD_RES (39)..(39): D-Ser
  MOD_RES (40)..(40): Covalently bound to 3-position of beta-estradiol via ether linkage
  MOD_RES (40)..(40): C-terminal amidation

SEQ ID NO: 1654 - protein, 40 aa, Artificial Sequence; identical to SEQ ID NO: 1650
  Synthetic peptide
  MOD_RES (2)..(2): Xaa is AIB
  MOD_RES (24)..(24): Covalently bound to 40kDa PEG via thioether
  MOD_RES (40)..(40): Covalently bound to 3-position of beta-estradiol via ether linkage
  MOD_RES (40)..(40): C-terminal amidation

SEQ ID NO: 1655 - protein, 40 aa, Artificial Sequence; identical to SEQ ID NO: 1647
  Synthetic peptide
  MOD_RES (2)..(2): Xaa is AIB
  MOD_RES (40)..(40): Covalently bound to 17-position of beta-estradiol via ester linkage
  MOD_RES (40)..(40): C-terminal amidation

SEQ ID NO: 1656 - protein, 40 aa, Artificial Sequence; identical to SEQ ID NO: 1648
  Synthetic peptide
  MOD_RES (2)..(2): Xaa is AIB
  MOD_RES (40)..(40): Covalently bound to 17-position of beta-estradiol via ester linkage
  MOD_RES (40)..(40): C-terminal amidation

SEQ ID NO: 1657 - protein, 40 aa, Artificial Sequence; identical to SEQ ID NO: 1649
  Synthetic peptide
  MOD_RES (1)..(1): D-Ala
  MOD_RES (2)..(2): Xaa is AIB
  MOD_RES (3)..(3): D-Glu
  MOD_RES (5)..(5): D-Thr
  MOD_RES (6)..(6): D-Phe
  MOD_RES (7)..(7): D-Thr
  MOD_RES (8)..(8): D-Ser
  MOD_RES (9)..(9): D-Asp
  MOD_RES (10)..(10): D-Val
  MOD_RES (11)..(11): D-Ser
  MOD_RES (12)..(12): D-Ser
  MOD_RES (13)..(13): D-Tyr
  MOD_RES (14)..(14): D-Leu
  MOD_RES (15)..(15): D-Glu
  MOD_RES (17)..(17): D-Gln
  MOD_RES (18)..(18): D-Ala
  MOD_RES (19)..(19): D-Ala
  MOD_RES (20)..(20): D-Lys
  MOD_RES (21)..(21): D-Glu
  MOD_RES (22)..(22): D-Ala
  MOD_RES (23)..(23): D-Ile
  MOD_RES (24)..(24): D-Ala
  MOD_RES (25)..(25): D-Trp
  MOD_RES (26)..(26): D-Leu
  MOD_RES (27)..(27): D-Val
  MOD_RES (28)..(28): D-Lys
  MOD_RES (31)..(31): D-Pro
  MOD_RES (32)..(32): D-Ser
  MOD_RES (33)..(33): D-Ser
  MOD_RES (35)..(35): D-Ala
  MOD_RES (36)..(36): D-Pro
  MOD_RES (37)..(37): D-Pro
  MOD_RES (38)..(38): D-Pro
  MOD_RES (39)..(39): D-Ser
  MOD_RES (40)..(40): Covalently bound to 17-position of beta-estradiol via ester linkage
  MOD_RES (40)..(40): C-terminal amidation

SEQ ID NO: 1658 - protein, 40 aa, Artificial Sequence; identical to SEQ ID NO: 1647
  Synthetic peptide
  MOD_RES (2)..(2): Xaa is AIB
  MOD_RES (40)..(40): Covalently bound to 3-position of 17-acetyl-beta estradiol via ester linkage
  MOD_RES (40)..(40): C-terminal amidation

SEQ ID NO: 1659 - protein, 40 aa, Artificial Sequence; identical to SEQ ID NO: 1649
  Synthetic peptide
  MOD_RES (1)..(1): D-Ala
  MOD_RES (2)..(2): Xaa is AIB
  MOD_RES (3)..(3): D-Glu
  MOD_RES (5)..(5): D-Thr
  MOD_RES (6)..(6): D-Phe
  MOD_RES (7)..(7): D-Thr
  MOD_RES (8)..(8): D-Ser
  MOD_RES (9)..(9): D-Asp
  MOD_RES (10)..(10): D-Val
  MOD_RES (11)..(11): D-Ser
  MOD_RES (12)..(12): D-Ser
  MOD_RES (13)..(13): D-Tyr
  MOD_RES (14)..(14): D-Leu
  MOD_RES (15)..(15): D-Glu
  MOD_RES (17)..(17): D-Gln
  MOD_RES (18)..(18): D-Ala
  MOD_RES (19)..(19): D-Ala
  MOD_RES (20)..(20): D-Lys
  MOD_RES (21)..(21): D-Glu
  MOD_RES (22)..(22): D-Ala
  MOD_RES (23)..(23): D-Ile
  MOD_RES (24)..(24): D-Ala
  MOD_RES (25)..(25): D-Trp
  MOD_RES (26)..(26): D-Leu
  MOD_RES (27)..(27): D-Val
  MOD_RES (28)..(28): D-Lys
  MOD_RES (31)..(31): D-Pro
  MOD_RES (32)..(32): D-Ser
  MOD_RES (33)..(33): D-Ser
  MOD_RES (35)..(35): D-Ala
  MOD_RES (36)..(36): D-Pro
  MOD_RES (37)..(37): D-Pro
  MOD_RES (38)..(38): D-Pro
  MOD_RES (39)..(39): D-Ser
  MOD_RES (40)..(40): Covalently bound to 3-position of 17-acetyl-beta estradiol via ester linkage
  MOD_RES (40)..(40): C-terminal amidation

SEQ ID NO: 1660 - protein, 40 aa, Artificial Sequence; identical to SEQ ID NO: 1650
  Synthetic peptide
  MOD_RES (2)..(2): Xaa is AIB
  MOD_RES (24)..(24): Covalently bound to 40kDa PEG via thioether
  MOD_RES (40)..(40): Covalently bound to 3-position of cholesterol via amide linkage
  MOD_RES (40)..(40): C-terminal amidation

SEQ ID NO: 1661 - protein, 40 aa, Artificial Sequence; identical to SEQ ID NO: 1647
  Synthetic peptide
  MOD_RES (2)..(2): Xaa is AIB
  MOD_RES (40)..(40): Covalently bound to 3-position of cholesterol via amide linkage
  MOD_RES (40)..(40): C-terminal amidation

SEQ ID NO: 1662 - protein, 40 aa, Artificial Sequence
  Synthetic peptide
  MOD_RES (2)..(2): Xaa is AIB
  MOD_RES (40)..(40): Covalently bound to 17-position of estradiol via hydrazone linkage
  MOD_RES (40)..(40): C-terminal amidation
HXEGTFTSDVSSYLEEQAAKEFIAWLVKGGPSSGAPPPSC

SEQ ID NO: 1663 - protein, 40 aa, Artificial Sequence; identical to SEQ ID NO: 1662
  Synthetic peptide
  MOD_RES (2)..(2): Xaa is AIB
  MOD_RES (40)..(40): Covalently bound to 17-position of beta-estradiol via carbamate disulfide linkage
  MOD_RES (40)..(40): C-terminal amidation

SEQ ID NO: 1664 - protein, 40 aa, Artificial Sequence
  Synthetic peptide
  MOD_RES (2)..(2): Xaa is AIB
  MOD_RES (40)..(40): Xaa is Beta, beta-dimethyl cysteine
  MOD_RES (40)..(40): Covalently bound to 17-position of estradiol via carbamate disulfide linkage
  MOD_RES (40)..(40): C-terminal amidation
HXEGTFTSDVSSYLEEQAAKEFIAWLVKGGPSSGAPPPSX

SEQ ID NO: 1665 - protein, 40 aa, Artificial Sequence; identical to SEQ ID NO: 1647
  Synthetic peptide
  MOD_RES (2)..(2): Xaa is AIB
  MOD_RES (40)..(40): Covalently bound to 17-position of beta-estradiol via diaminoethane-Phe-Lys linkage
  MOD_RES (40)..(40): C-terminal amidation

SEQ ID NO: 1666 - protein, 40 aa, Artificial Sequence; identical to SEQ ID NO: 1647
  Synthetic peptide
  MOD_RES (2)..(2): Xaa is AIB
  MOD_RES (40)..(40): Covalently bound to 3-position of estrone via ester linkage
  MOD_RES (40)..(40): C-terminal amidation

SEQ ID NO: 1667 - protein, 40 aa, Artificial Sequence; identical to SEQ ID NO: 1647
  Synthetic peptide
  MOD_RES (2)..(2): Xaa is AIB
  MOD_RES (40)..(40): Covalently bound to 17-position of beta-estradiol via carbamate linkage
  MOD_RES (40)..(40): C-terminal amidation

SEQ ID NO: 1668 - protein, 40 aa, Artificial Sequence; identical to SEQ ID NO: 1647
  Synthetic peptide
  MOD_RES (2)..(2): Xaa is AIB
  MOD_RES (40)..(40): Covalently bound to 17-position of beta-estradiol via diaminoethane-Phe-Lys paraaminobenzyl alcohol linkage
  MOD_RES (40)..(40): C-terminal amidation

SEQ ID NO: 1669 - protein, 40 aa, Artificial Sequence; identical to SEQ ID NO: 1662
  Synthetic peptide
  MOD_RES (2)..(2): Xaa is AIB
  MOD_RES (40)..(40): Covalently bound to 17-position of dexamethasone via hydrazone linkage
  MOD_RES (40)..(40): C-terminal amidation

SEQ ID NO: 1670 - protein, 40 aa, Artificial Sequence; identical to SEQ ID NO: 1647
  Synthetic peptide
  MOD_RES (2)..(2): Xaa is AIB
  MOD_RES (40)..(40): Covalently bound to 3-position of dexamethasone via carbamate linkage
  MOD_RES (40)..(40): C-terminal amidation

SEQ ID NO: 1671 - protein, 40 aa, Artificial Sequence; identical to SEQ ID NO: 1647
  Synthetic peptide
  MOD_RES (2)..(2): Xaa is AIB
  MOD_RES (40)..(40): Covalently bound to 3-position of dexamethasone via carbamate linkage
  MISC_FEATURE (40)..(40): C-terminal amidation

SEQ ID NO: 1672 - protein, 40 aa, Artificial Sequence; identical to SEQ ID NO: 1662
  Synthetic peptide
  MOD_RES (2)..(2): Xaa is AIB
  MOD_RES (40)..(40): Covalently bound to 3-position of dexamethasone via disulfide linkage
  MISC_FEATURE (40)..(40): C-terminal amidation

SEQ ID NO: 1673 - protein, 40 aa, Artificial Sequence; identical to SEQ ID NO: 1664
  Synthetic peptide
  MOD_RES (2)..(2): Xaa is AIB
  MOD_RES (40)..(40): Xaa is Penicillamine
  MOD_RES (40)..(40): Covalently bound to 3-position of dexamethasone via disulfide linkage
  MISC_FEATURE (40)..(40): C-terminal amidation

SEQ ID NO: 1674 - protein, 40 aa, Artificial Sequence; identical to SEQ ID NO: 1664
  Synthetic peptide
  MOD_RES (2)..(2): Xaa is AIB
  MOD_RES (40)..(40): Xaa is homocysteine
  MOD_RES (40)..(40): Covalently bound to 3-position of dexamethasone via disulfide linkage
  MISC_FEATURE (40)..(40): C-terminal amidation

1. A compound comprising the structure Q-L-Y;
wherein Q is a glucagon superfamily peptide;
Y is a GR ligand which activates a glucocorticoid receptor with an EC₅₀ of about 1 μM or less, and has a molecular weight of up to about 1000 daltons; and
L is a linking group or a bond, wherein Q-L is attached to position 3 or 17 of the GR ligand.

2. The compound of claim 1, wherein Q exhibits at least 0.1% of the activity of native GLP-1 at the GLP-1 receptor, at least 0.1% of the activity of native glucagon at the glucagon receptor, or at least 0.1% of the activity of native GIP at the GIP receptor, or a combination thereof.

3. (canceled)

4. (canceled)

5. The compound of claim 1, wherein Q has an EC₅₀ at the GLP-1 receptor within 10-fold of the EC₅₀ of Y at the glucocorticoid receptor, an EC₅₀ at the glucagon receptor within 10-fold of the EC₅₀ of Y at the glucocorticoid receptor, or an EC₅₀ at the GIP receptor within 10-fold of the EC₅₀ of Y at the glucocorticoid receptor, or a combination thereof.

6. (canceled)

7. (canceled)

8. The compound of claim 1, wherein Y is a compound of Formula C.

9. The compound of claim 8, wherein Y is cortisol or a derivative thereof.

10. The compound of claim 9, wherein the cortisol or derivative thereof is selected from the group consisting of cortisol, cortisone acetate, beclometasone, prednisone, prednisolone, methylprednisolone, betamethasone, trimcinolone, and dexamethasone.

11. (canceled)

12. (canceled)

13. The compound of claim 1, wherein L is stable in vivo, hydrolyzable in vivo, or metastable in vivo.

14. (canceled)

15. (canceled)

16. The compound of claim 13, wherein L comprises an ether moiety, an amide moiety, an ester moiety, an acid-labile moiety, a reduction-labile moiety, an enzyme-labile moiety, a hydrazone moiety, a disulfide moiety, or a cathepsin-cleavable moiety.

17. (canceled)

18. (canceled)

19. (canceled)

20. The compound of claim 10, wherein the compound comprises the structure (I): [chemical structure]
wherein
B′ is an amino- or thiol-containing side chain of an amino acid of Q, wherein
B′ is the side chain of an amino acid corresponding to position 10, 20, 24, 30, 37, 38, 39, 40, 41, 42, or 43 of a sequence comprising native glucagon;
L is a bond, [chemical structure]
and,
x is C₁-C₁₀ alkylene (e.g., C₁-C₆ alkylene), C₁-C₁₀ alkenylene, or C₁-C₁₀ alkynylene; or
(II): [chemical structure]
wherein
B″ is a thiol-containing side chain of an amino acid of Q, wherein B″ is the side chain of an amino acid corresponding to position 10, 20, 24, 30, 37, 38, 39, 40, 41, 42, or 43 of a sequence comprising native glucagon, and
y is C₁-C₁₀ alkylene (e.g., C₁₋₆), C₁-C₁₀ alkenylene, or C₁-C₁₀ alkynylene.

21. The compound of claim 20, wherein
x is C₁-C₆ alkylene;
B′ is [chemical structure]
and,
z is C₁-C₆ alkylene.

22. The compound of claim 21, wherein the compound comprises the structure:

[chemical structure]

23. The compound of claim 22, wherein the compound comprises the structure:

[chemical structure]

24. (canceled)

25. The compound of claim 20, wherein the compound comprises the structure:

[chemical structure]

26. The compound of claim 10, wherein Q comprises
(I) an amino acid sequence at least 50% identical to native glucagon that retains the alpha-helix conformation of the amino acids corresponding to amino acids 12-29 of native glucagon (SEQ ID NO: 1601);
(II) an amino acid sequence at least 50% identical to native GLP-1 that retains the alpha-helix conformation of the amino acids corresponding to amino acids 12-29 of native GLP-1 (SEQ ID NO: 1603); or
(III) the amino acid sequence:
X₁-X₂-Gln-Gly-Thr-Phe-Thr-Ser-Asp-Tyr-Ser-Lys-Tyr-Leu-Asp-Ser-Arg-Arg-Ala-Gln-Asp-Phe-Val-Gln-Trp-Leu-Met-Z (SEQ ID NO: 839) with 1 to 3 amino acid modifications thereto,
(a) wherein X₁ and/or X₂ is a non-native amino acid (relative to SEQ ID NO: 1601) that reduces susceptibility of the glucagon peptide to cleavage by dipeptidyl peptidase IV (DPP-IV),
(b) wherein Z is selected from the group consisting of —COOH, -Asn-COOH, Asn-Thr-COOH, and W—COOH, wherein W is 1 to 2 amino acids or GPSSGAPPPS,
(c) wherein Q comprises a modification selected from the group consisting of:
(i) a lactam bridge between the side chains of amino acids at positions i and i+4, wherein i is 12, 16, 20 or 24, and
(ii) one, two, three, or all of the amino acids at positions 16, 20, 21, and 24 of the glucagon peptide is substituted with an α,α-disubstituted amino acid; wherein Q exhibits glucagon agonist activity.

27. (canceled)

28. (canceled)

29. The compound of claim 26, wherein Q comprises the amino acid sequence of SEQ ID NO: 1601 and comprises:
(a) at least one amino acid modification selected from the group consisting of:
(i) substitution of Thr at position 29 with a charged amino acid;
(ii) substitution of Thr at position 29 with a charged amino acid selected from the group consisting of Lys, Arg, His, Asp, Glu, cysteic acid, and homocysteic acid;
(iii) substitution at position 29 with Asp, Glu, or Lys;
(iv) substitution at position 29 with Glu;
(v) insertion after position 29 of 1 to 3 charged amino acids;
(vi) insertion after position 29 of Glu or Lys;
(vii) insertion after position 29 of Gly-Lys, or Lys-Lys;
(viii) substitution of Gln at position 3 with an amino acid comprising a side chain of Structure I, II, or III: [chemical structure]
wherein R¹ is C₀₋₃ alkyl or C₀₋₃ heteroalkyl; R² is NHR⁴ or C₁₋₃ alkyl; R³ is C₁₋₃ alkyl; R⁴ is H or C₁₋₃ alkyl; X is NH, O, or S; and Y is NHR⁴, SR³, or OR³; and
(ix) a combination thereof;
(b) substitution of Ser at position 16 with Thr, Glu, or Aib; and at least one amino acid modification selected from the group consisting of:
(i) substitution of His at position 1 with a non-native amino acid that reduces susceptibility of the glucagon peptide to cleavage by dipeptidyl peptidase IV (DPP-IV),
(ii) substitution of Ser at position 2 with a non-native amino acid that reduces susceptibility of the glucagon peptide to cleavage by dipeptidyl peptidase IV (DPP-IV),
(iii) substitution of Thr at position 7 with Ile, Abu, or Val;
(iv) substitution of Gln at position 20 with Ser, Thr, Ala, Aib, Arg, or Lys;
(v) substitution of Met at position 27 with Leu or Nle;
(vi) deletion of amino acids at positions 28-29;
(vii) deletion of the amino acid at positions 29;
(viii) addition of the amino acid sequence GPSSGAPPPS to the C-terminus; and
(ix) addition of the amino acid sequence GPSSGAPPPSX to the C-terminus, wherein X is any amino acid; and
(x) a combination thereof;
wherein Q exhibits glucagon agonist activity.

30. The compound of claim 26, wherein
(I) Q comprises a glucagon related peptide of SEQ ID NO: 1601, with the following modifications:
(a) an amino acid modification at position 1 that confers GIP agonist activity,
(b) a modification selected from the group consisting of:
(i) a lactam bridge between the side chains of amino acids at positions i and i+4 or between the side chains of amino acids at positions j and j+3, wherein i is 12, 13, 16, 17, 20 or 24, and wherein j is 17, and
(ii) one, two, three, or all of the amino acids at positions 16, 20, 21, and 24 of the analog is substituted with an α,α-disubstituted amino acid,
(c) 1-10 further amino acid modifications;
wherein Q exhibits activity at the GIP receptor;
(II) Q comprises the amino acid sequence:
X₁-X₂-Gln-Gly-Thr-Phe-Thr-Ser-Asp-X₃-Ser-X4-Tyr-Leu-X₅-X₆-X₇-X₈-Ala-X₉-X₁₀-Phe-X₁₁-X₁₂-Trp-Leu-X₁₃-X₁₄-X₁₅ (SEQ ID NO: 55), or an analog thereof, wherein said analog differs from SEQ ID NO: 55 by 1 to 3 amino acid modifications, selected from positions 1, 2, 3, 5, 7, 10, 11, 13, 14, 17, 18, 19, 21, and 25, wherein:
(a) X₁ is His, D-His, (Des-amino)His, hydroxyl-His, acetyl-His, homo-His, or alpha, alpha-dimethyl imidazole acetic acid (DMIA), N-methyl His, alpha-methyl His, or imidazole acetic acid;
(b) X₂ is Ser, D-Ser, Ala, D-Ala, Val, Gly, N-methyl Ser, aminoisobutyric acid (Aib) or N-methyl Ala;
(c) X₃, X₄, X₅, X₁₀, X₁₁, and X₁₄ are, individually, any amino acid;
(d) X₆ is Ser, Glu, Gln, homoglutamic acid or homocysteic acid;
(e) X₇ is Arg, Gln, Lys, Cys, Orn, homocysteine or acetyl phenylalanine;
(f) X₈ is Arg, Ala, Lys, Cys, Orn, homocysteine or acetyl phenyalanine;
(g) X₉ is Gln, Lys, Arg, Orn or Citrulline;
(h) X₁₂ is Ala, Gln, Glu, Lys, Cys, Orn, homocysteine or acetyl phenyalanine;
(i) X₁₃ is Met, Leu or Nle;
(j) X₁₅ is Thr, Gly, Lys, Cys, Orn, homocyesteine or acetyl phenyalanine; and
comprises one of the following modifications:
(a) deletion of amino acids at positions 28-29;
(b) deletion of the amino acid at positions 29;
(c) addition of the amino acid sequence GPSSGAPPPS to the C-terminus; and
(d) addition of the amino acid sequence GPSSGAPPPSX to the C-terminus, wherein X is any amino acid; and
(e) a combination thereof; or
(III) Q comprises an amino acid sequence that differs from SEQ ID NO: 1601 by no more than ten amino acid modifications, comprising:
(a) one or more amino acid substitutions with Aib at positions 16, 20, 21, and/or 24, and
(b) an amino acid modification at position 1 and/or 2 that provides reduced susceptibility to cleavage by dipeptidyl peptidase IV, and
comprising one or more of the following modifications:
(a) deletion of amino acids at positions 28 and 29,
(b) deletion of the amino acid at position 29,
(c) addition of the amino acid sequence GPSSGAPPPS to the C-terminus,
(d) addition of the amino acid sequence GPSSGAPPPSX to the C-terminus, wherein X is any amino acid,
(e) substitution of the C-terminal carboxyl group with an amide or carboxylic ester, and
wherein Q exhibits GLP-1 agonist activity and glucagon agonist activity.

31. The compound of claim 30, wherein the 1-10 further amino acid modifications in (I) are selected from the group consisting of:
(i) substitution of serine at position 2 with D-Ser, Ala, D-Ala, Gly, N-methyl-Ser, Aib, Val, or ε-amino-N-butyric acid;
(ii) substitution of serine at position 16 with Glu, Gln, homoglutamic acid, homocysteic acid, Thr, Gly, or Aib;
(iii) substitution of glutamine at position 20 with Ser, Thr, Ala, Lys, Citrulline, Arg, Orn, or Aib;
(iv) substitution of methionine at position 27 with Leu;
(v) substitution of argnine at position 28 with Ala;
(vi) substitution of threonine at position 29 with Gly;
(vii) a conservative substitution at any of positions 2, 5, 9, 10, 11, 12, 13, 14, 15, 16, 17, 18, 20, 21, 24, 27, 28, and 29;
(viii) addition of 1-21 amino acids to the C-terminus
(ix) addition of the amino acid sequence GPSSGAPPPS to the C-terminus,
(x) addition of the amino acid sequence GPSSGAPPPSX to the C-terminus, wherein X is any amino acid,
(xi) substitution of the C-terminal carboxyl group with an amide or carboxylic ester, and
(xii) a combination thereof.

32. (canceled)

33. (canceled)

34. The compound of claim 10, wherein L-Y is covalently conjugated to the N-terminus, C-terminus, or an amino acid side chain of Q.

35. The compound of claim 10, wherein L-Y is conjugated to an amino acid side chain of Q that corresponds to position 10, 30, 37, 38, 39, 40, 41, 42, or 43 of native glucagon (SEQ ID NO: 1601).

36. (canceled)

37. A prodrug of the compound of claim 10 comprising the structure A-B, wherein
A is an amino acid or a hydroxy acid;
B is an N-alkylated amino acid linked to Q through an amide bond between a carboxyl moiety of B and an amine of Q;
A, B, or the amino acid of Q to which A-B is linked is a non-coded amino acid, further wherein the chemical cleavage half-life (t_{1/2}) of A-B from Q is at least about 1 hour to about 1 week in PBS under physiological conditions.

38. The compound of claim 37, wherein A-B comprises the structure: [chemical structure]
wherein
(a) R¹, R², R⁴ and R⁸ are independently selected from the group consisting of H, C1-C18 alkyl, C2-C18 alkenyl, (C1-C18 alkyl)OH, (C1-C18 alkyl)SH, (C2-C3 alkyl)SCH3, (C1-C4 alkyl)CONH2, (C1-C4 alkyl)COOH, (C1-C4 alkyl)NH₂, (C1-C4 alkyl)NHC(NH₂⁺)NH₂, (C0-C4 alkyl)(C3-C6 cycloalkyl), (C0-C4 alkyl)(C2-C5 heterocyclic), (C0-C4 alkyl)(C6-C10 aryl)R⁷, (C1-C4 alkyl)(C3-C9 heteroaryl), and C1-C12 alkyl(W1)C1-C12 alkyl, wherein W1 is a heteroatom selected from the group consisting of N, S and O, or
(ii) R¹ and R² together with the atoms to which they are attached form a C3-C12 cycloalkyl or aryl; or
(iii) R⁴ and R⁸ together with the atoms to which they are attached form a C3-C6 cycloalkyl;
(b) R³ is selected from the group consisting of C1-C18 alkyl, (C1-C18 alkyl)OH, (C1-C18 alkyl)NH₂, (C1-C18 alkyl)SH, (C0-C4 alkyl)(C3-C6)cycloalkyl, (C0-C4 alkyl)(C2-C5 heterocyclic), (C0-C4 alkyl)(C6-C10 aryl)R⁷, and (C1-C4 alkyl)(C3-C9 heteroaryl) or R⁴ and R³ together with the atoms to which they are attached form a 4, 5 or 6 member heterocyclic ring;
(c) R⁵ is NHR⁶ or OH;
(d) R⁶ is H, C1-C8 alkyl or R⁶ and R² together with the atoms to which they are attached form a 4, 5 or 6 member heterocyclic ring; and
(e) R⁷ is selected from the group consisting of H and OH.

39. The compound of claim 10, further comprising an amino acid side chain on Q covalently attached to an acyl group or an alkyl group via an alkyl amine, amide, ether, ester, thioether, or thioester linkage, which acyl group or alkyl group is non-native to a naturally occurring amino acid.

40. The compound of claim 39, wherein the amino acid to which the acyl or alkyl group is attached is at a position corresponding to position 10, 20, 24, 30, 37, 38, 39, 40, 41, 32, or 43 of a sequence comprising native glucagon, or the C-terminal amino acid.

41. (canceled)

42. The compound of claim 40, wherein the acyl group or the alkyl group is attached to the side chain of the amino acid through a spacer.

43. (canceled)

44. The compound of claim 10, wherein Q is covalently attached to one or more heterologous moieties.

45. (canceled)

46. The compound of claim 10 wherein Q is selected from the group consisting of SEQ ID NOs: 1-564, 566-570, 573-575, 577, 579-580, 585-612, 616, 618-632, 634-642, 647, 657-692, 694-695, 715-718, 722, 724-725, 729, 731-760, 801-878, 883-919, 1001-1275, 1301-1371, 1401-1518, and 1601-1650.

47. (canceled)

48. A pharmaceutical composition comprising the compound of claim 10 and a pharmaceutically acceptable carrier.

49. A method for treating a disease or medical condition in a patient, wherein the disease or medical condition is selected from the group consisting of metabolic syndrome, diabetes, obesity, liver steatosis, and a neurodegenerative disease, comprising administering to the patient the pharmaceutical composition of claim 48 in an amount effective to treat the disease or medical condition.
